United States Patent Application Publication US 2022/0031776 A1 - sequence listing, part 2

SEQ ID NO: 39 - DNA, 178849 bp, Unknown
  source: /note="Description of Unknown: KP2M-M0111 Bacteriophage sequence"
cccgccatataaaattttaatctgcttactgggatcaccggacggataacgtcgcgatagccgaaatgcgcactacgcaccactatagagagcatacgcaaacggttgatacatccggtatacgaacgaccagtagcgcgggagaagtcctccagcgtaacacctggggcaatagcacctatcagatcaagataatccttttcaacccagaaccgcccgacagaacatttcgatacaccctcagccatttttgcgtttgggtgtttctcgtcttcgcgcttcttcttgtcctcaaggaacttattgaaccggatttcttcgagtcggttttcccgttctacccgcgcacgtacacgggaggggaacagagtatcaaggattttcccgatcatatcgttggctttccgtttggtagtttcagatcgaaaggaacattcacaggccggacggtttctaattggagatattgttccatccccacacgcttaccacctactttgttataacggatgttctttccgtcatagcctacagcctgtgaaatgtagtagtgtttagtttcgcgtaaacactccatccattcttgtgttccggttttgttgcgtacccgcgcctttaatggaaacatcattcaccccgtagaactttcagttcaccagacaaacgctgtagattggcggttgcagtatcgtaacgtttttcggtctctttcagggtagtttcccgcgccttacgcaagaatttttccagatcacctggtttcgtcaccagcttaccatctacgtaaattcgtcccagcaggtgagaacaatccagcagttgttgcgcgtcggctttttcaacagcaggtttaatcgcgacaaactttttaaagaatccgcgatcctcgttatcaaacagatatgaatcttcggaataccatgttgtgccattggcatcaacgatcccactaacacctttccggttgcagtgcgttaccttgataggaaacacgacagatgatagttgattaggcgacagaggactaccacgcaaagctaaattgcggtacacagtcccaaaactttcttcgtcacgaaattcaaaatagtcttttgtccagtacatcattttcaatacctcatagtttcggtatgtgcaatataacaaaagcccctcactttcgcaaggggctttttgattaattttgatgcttagttcggtgcatcatttctttgttcttaccttcgttgaaaccacgaacagcaggagcacccagataaccgcatgtacggcgcgtgacgctcattttagccggatcgtgattaccgcagtgcttacagtggaaaccttcttctgtaggcgtgaactcgtcatcagagccacatacaaagcacttatcgaccggaaggttagttccgaagtaatccagtttatccatcgcataatcccagactttttccagggcttgcaggttgtttttcatatcagggaattcaacataactgatatgaccagcagtagcgatgtaatgataatcggcttcatagtcgattttctcgaacggtgttaccttgcggtcaacgtccagatggaaactgtttgtgtaccagcctttatccgtgatccctttgatgcttccgaacttctcaaagtccagtttacagaagcgatgacagagagattccgctggggttgaatacaggctgaatccgaaaccagttttcttcttccatgcttcggttgcagcgcggagatattcaatgatcaatcggcctaatttctgggagccgatacgatcaaatgggtgttggcctgagccaaacatcaacagcgtttcgtgcagtccaatataacccagactgatagaactacgcccatttttgaacagttccagaatttcatcatcaggattcagacggacaccaaatgcaccttctgtgtacaggataggcgcaacgctggctttaacaccacgtagactatcaattcgagtcatcagggcttcaaagcacaaacccagacgatcatcaagaatacgccaaaaagcctcgtgtgcgtcgtctgcttcctgtgcttcaagagcaatacgcgggaggttgattgtcaccacacccaggttattacgtccatcaagaatttcattaccgttatcatcatgccacacgctaaggaaactgcgacaacccataggagatacaggaacgctagaaccagtaatagcacggttgttagctgaactaatgatatctgggtacatgcgtttagaagcacattccagggcaagttgtttgatgtcatagttgcgatcctctggatcaaggttgattcctttttccatgaacataaccagtttcgggaataccggagtgataccctctttacccaggccgcgaatacggtttttcagaatcgctttctggatcatgcgttcacatcgggattgaccagtaccgaacgtaattgtaacaaacggggtttgaccgttcgcagtatgcagggtgtttacttcgtattcatatgactgaaacgcgtcgaaaacatccttttcagttttatctattgcatactgaacatcacgagggatttgatactttttggcatctttaaagtgcttatcatatgtcatttgaacatatggagccagcactttatcaacgttagcaaaggttgtcccgccgtactggtgagaggcaatctgtgcggtgatctgtgccataagagcagtcgcaacaccgattgatttcgggggttcgatgtctgcgttacccatcttgaagccattagccagcatacctttcaaatccaccagacagcagtttgtgtatggcgtgaacgggctgtaatccagatcatgataatggatgtcaccggaatcatgcgcttctacgatgtgtttcggaaggatatgattacgggcgaaatgcttcgctacgataccagccagcagatcgcgctgtgtcgggaatacccttgcgtctttgttcgcgttctcgttggtgatctctttgttggacagattcaccataccggagatatctttgaacagcttacttttctgttcacgggcaatatcgcgatcgtggcgatattcgatgtatgcacgggcgaccgctgggttcgttttcatcagggattcttcaacgagttcctggatacgggcgatcttcattgaactaaaatcacggatctgattgtactgaaccagcatgattgcggcatcagcatccgtcatagtcccgccagctttatacacagcattgcgaattttttcttgatcgaaatcgacggttttgccgtcgcgtttttctactttcatttcgttgccttatggataatatctaaattgtgtccaatatcgttaagatatttgatcagttcaaccccgtcaacaggtatatcccgtcctacaatctcaaggagttcccacatatcaataacggtgataggagaaaaattagtcaatgtgcgaccgcgatcatcaaacatcgttcggtctttcggtttgacataacacaaatcagagtcaccccttccaagcatccaatcatgtagagatatgatctttttgtcagtggaggatatcaacatcatcagctttttcttctgttgcgttgataatcgagcgtttagatatttcatttcgttgccttcattaattgctttctatatttcgcggttaaggctttgcgttcgtctttgtcggcgtactcgaagcccatagaaaccatttcggcaatcatatcaggtttggtaagtcttgaaaaccattttaccttatctggtatgaatttgtcatgaatacggttttcggaatagtcttgtttcagatatgcaagcaagttctctaaccactggatgtaatcgacatcacgggacacaagaccggatctgttgaatttgtgcttcacaataccttctgtaccgttacacaggttacacaggaggccgcgcacacgtccggcgttttcgccgtctaaagcatggtcatggtcaaggtgatgtttctcgatctctccctcaagaggacgtttacatatagcacaatgcccaccttgtttttcaaagagggcttgcttgatagttgggtagtcttttttggtaattcgtttcgtcagcataataacaccattcagtaaggtgtcattatttattacagggtgcggacgtactcacgaagttggtcgaatccgcctacgtgtttcccgtcatggaaaatctgaggcatggtcatccggcgcgtaccaaccagggattcgagttcatcgatcaccgcttcgttcagtacaggtttaccgtcttccacggaatccgcaacagacacgaactcatacggatgttttttcgcgtccagcaagcgctttgagttcaggcacggagcgcagttatacacagaagggatatagccataaattttaaacatgttaacctacattaaatcgttcagtgttaaagggaatgtatttacgtcgcgtttctgatagttgcacacgtagacttcttgtgttttgttttgctcgtaagagtcggtatgctggcctaacagatactttttatccagattatgaacgcggtatttctgcatccattcaatcaggatatcattttgttttccggcatggtgagtcacgttggacagtccgaacatgattccttcgctgtgtagttcatccaggaaagcatataactcgcgttcgcgatcttcgttccagaacttgttatacactgcatcggtgatcaggtacggcggatcacagtacacgaaatcattttcacagatatcaatgtcacggaatgaaccactggaaaactcaatacctttcacattctttttgaaatgttcaaagcgttttactgttgcatcgttgagcgtccggcatccgaaattagcgttaaagtcgcctttgtcgtttgtccggttaacgttgctgaatgaatgcaggatcaggacatagagccataacggatctttgttctggttgtattcatcacggaatttcaaatactcttctttcttgtctttccccaacccctttgatgcaatcaattctcgcaccggagacaggtcaggaagcgttttaagacgctcatacatatcaataagcgtcttatcgtaatcgttgcttagaacgggtttagggacgtttaacgacacactaaggccaccgcaaaaacaatcaatgaaacgcatgtatgaacttctttcggggaacagcttgaagagttcaggcaatagcgattgcttgttacctgtatacgggataacacccaaataactcatagaaaagattccagattgttaacgtatggctgaacacgaagaatagaatcgtgataataattctccatcagttcgaagcctttgaaccgtctgttggttagtatcgacattttcataactgtaccagaaccagagaaaatatcaagaaccaagtccccttcaaccgtccacgttttaatgtgatcttctgccagttgttcaggaaatattgctgggtgtttgaatgcaatctcgtccttcgttgagtgattgcgccctacagcgtaataccagatattacccttaattttatccttgccaacaggtttacgtttcttaccggaacgggctgaacggttcttttcgttggtttcggaaaagtagctgttttgtcgtgcggtttccttttcagggaacttacacggaatgcggatcgggttgaatgtttttggtgcgccttttgtccacacgaacatgtattcaaagtcctgttcgtatcggttatggttcttcggtagagcggttttgtgatagatcatcgtatcatgcaaccgaaaaccttgttcgatcgcgtacaaggcttgacggaaagatgtacccgtttcactaccgttgatagtcgcgtcacccacaacccacacaaccacaccaccaggcgcggtaacgcggtacagttccgatatcaactctttccatacgtgttcaccccagacatcaccagagccgttataatggcgcaagttgtcatacggaggcgaagttatggtcaagtcaacagaaccagattcaagctgtttaatcagctttacggagtcgcctaaatggaggtcaaccccttctttgattgtggtaatcataattcaccaagtcctttctcaaataaggcgatcgtttcgtacttatacccacgattcaccacgaagcaataattttcacctaatttctcaagcattgcaatagcacggtgttcatcttttttatctttcaacagataagcaattcgaacaacctcttttagtgtcgcgttgtccacctgttccaacttgaacccgtagcccaccaacttacaaaaaagccccttgcgagcgacaaggggctgattgttgtagaagactaccgatccgttatcgttggcgcggatattaaatccttgctcgctcacggataacccctactgtatcggaggtgtttaatacaccgttgtcgtaatacgtaatcatcgcatcacgccacccgtcaggaatctcagtttccagagtatcgattgttttgaattccacaccgttagtgatggtcatcagcaaacctttcttactctgtttccattcggaacctttcgggcatttgtaaacgcctttccacacaccattcacgcggatagcgcacagtttttcagcatacttttgagtgtcgcgggtaacttcttgcagcaaaccgccgcccataccgaacgcgatgttctcactcgcccacttgttcgcttccatccaacttaacacacggttgattgtttcaggtccgtggatctcgtcgccctggatgattcgaactgaattatgcagaactttgtaacctttgctgtttacggtgtaaccgaagatttcgcccagtttacgcatggtgtacatgatgttatcaatcatatcaccggaatcaggacgaacaaccagagtaccacccgcagcaatgatttgctctttatattcagcgatgcgatctacagcgcctttgtagtcccaggaatcgtacacacaagcgtagaaccctgtaccgaacatttcgatgctgtttttgtatgcttcgtcttcattctctttaccgtaggaaatcgtagtcgaatgttcgcgagccggaattgaaacaccgattgcttcgacgttttcaacttcatcaaacagagtttgatagtccgcaaacagactgattgccataatcataccttcaacggtatcagtcccgatgaagttatagaggtgtgccagcccaccaatacccgcagattcagcagaggtcgcgccacgcgccccgaaatcatgcagacgtgtacccagtgtgatgttatatgcttcaccagtcaggtcagaagtcatatcaaggtaatgagccagaacctttttacactcacgcgatagcgttgctacagatgacggataccagataccgcgaatcgtcattgtctccagccacccagccaaccatgagaattcacgttcggcgtacacagtcgcaacggcatttttaaccggaacaaccgtaccttctgggatcgcacggaaagtaacagggacataacccagttctgcgatcttcttccacccttcgtagttgaaaatctctttcccaaagtgcttacggtaaagtacccgtgccaactcaacttgtttcatggtaattggttcagcaagaacccgcgcaacgaagttaacgccagcggttactacttcatcaaacttaccaccgcgagattcaatatagaacatcgctgcatcagtgccttgtggatactgcaaccagtgggacactttgtaggaatcagttgaggtgatcaggctattcagttcattaaaagttttcatttaaacgtactccacgttttgatttaaaagatacgatccaaacgttctggatggatcgtgttccagtatttactcttacagtctttcctggattttttaccattagagcagaacaccttatgatatgtcgtcttcttgtgcaactctttgcacgtaggacaggtgatcatggttcctactttagcggcttttgcaacatcgtacaattgtttgatgtccttctgccgctcggacgtaatgacacgcccgtttacttctttgacaaccgtttcagttcgaatcgaaccatcggaatatttaacaggagttttgacttgcttcggcgcatttgcttgttgcaaaagccttagagtttctcgacgtaaattatgaccacaaaaatcatcgtcgtcatcgtcatagccaccccagctatcaatatattctgcttcactcatgttcgatccttagttgctggtcagtaagaagacccggttgtcgctatagtcgatgtagcaatcccaccaacccgcacagttaacaccatctttttcaaggcttatgattttaacgctggttgcaacgtcatcatattcataaaccgcacccagttcgttcagcattgcttcaacgttagcccgtaagcctttaccgttgtgtgctacaccattcagtgccaagcagtagccagcgcaagtaggtactaatttgatttccatgatgttttccttttgggttagtgtcttgtctacgggagctatattaccacactcataactcccgtcaacaagtttttcgaattattttcaccaggtgatgtaataagtcagatcgctatatccgtcacgcttaggatcgctaaagttggtaatacgacgcgaacccgcgaaggtattgagtaacgcagcttgtcggttgcgctgggtatcgaaagtaaacccttcttccgccagccattcacccagatccgcatatgctttttcggtacattcctgatccataaccttaccgataaaacgtttcatatcaaaggtatatgcttgtttagtcggatatttcaggacatactcggaaatgtctttacgggatgcttcgaccattttcgcgttgatttcatcaaccagtttacgcgcacgttccgccagtgtcgggctacgtccacagcggggatcatcttgtgtttcgcgtttgacccacgatgtcccgcttcccgcctgtgcgttcacaccgattccattgatttctaccattatgttttgccttttttaatgcctcttcaacagagaggcgttcgtaattacgtgattgttcgggagttatcaccagagaaaatccagagtaggaggtttagtgttaatccctaaagtatcgcagacttcatccagaacgttttgattccaaaggttgaacgttggaactttatacaatctggcaagccttgcagcgatcgcagtaccacctttaacacaaaaatctttctctaccgcccagaatagaacaaaatctgtaggtttgtccaggttttcggttaatacctgcattgaattgcgagcgtatcggcgttgtgtccattcgctttggttgtcgaagtgtccagctacctttctcgcttcgtcagcggctttgtacgtgtcgtattctgtatagtcgatgatatccttaccattagaatacaacccgttaaaaccgttctcagggaggattatacgccgtctttctggtgagtagtcaaacatgaaatggctatccattccaggagcaccaccagagtaagcgaagatcccccgatcacttaaagcacgtccaatctttatggctatgctcgcgatacgttcagggggttcacggctaccgatcagggtagccgtttttgcgttttcgagaacagttttaaaattcattgttcaggattgcgccccagttctcacgaaccagatttgacgcttcgttagtgaaggttttcttcgccagcgttggattttcgaactgttccaggaaaggcccgtagttacgttcgatttcttctagcgcgtcctgtaccgtaagccccatcacgcgaccgaaatctttagcggtgagattcgcgctgtcaattttggacagaacgtttttcacacggttttcagtcaggtagcaggtgaattcgttcagcttcactttgtctgtttctgacagttcagaaggagcattgaagcggttcgcttgcttgttcttcttctctgtgaacttcgtcgttttgcatttgattgcaacgcgttcaccgttcggcatgaaagcgggttgaacaggcttcatcacgaaaccttctgcgatgttctcaccttcaccatctttcagcgtcatgaagtttttgaactcaggttcaacaccgttctttgcagggatcgcaccggagttcgccaggttaaccaccgaatcaaaggtgataggcagtgtgcggatctcgtcaaacgtaccgtatgccagcagtggagccattttcaggtcaacagcaacagcgtaatttgcaacaacgttatcagggaggaattcgccattaacacggatatcaaatacgtagaaatctttttcgccgtagtcaacatctttctggacaccacgccccgcgaattcgccgtatacctgaatcaccagttcatcgctatacacgccacttaactgacgggcagcagagagcatttcccacatcttacgaacaggttcagagtattttgcaactactggttcacaaccgtagaattgttcagcagggaggatttcaccgctacgttttgccggaatgactttgataccgtccgaagtaatcaggctaaagttagccccgtggatcttttcacgcgcaacccacacgccaccagtcaaaccattcatgatcacaccattgatgaatttaccttcataatggttagtcagagaagaatatttcacaaacataattaacccttgattttcagttgtttttcaatttgatacgcagctttgcgtaacagtttcagttttacttctggaaggatcacagaacccttcataaacgcatcgagatttgatttctcgctattcgcggcgctggttactgcgatcgtgttttcaaccgtgtatcccagagaagcgttgattcgttccattgttcgggagtcagagcaaccgcctttgttgctaaacggtctgccggagtaagaacatacgggttcactcattagcttcgcccagtcgcttaacgtcagagcaaattgaaggttgcggttacgcgcatcatcgtttttactgttgtatgaacgagcgacacgcagatcgaattcaatttgctttgcacggcggcggtgttctaactcagcaggatcgagtgataccatagtttgaactttttccggttctactggctttggttttgcttcaaccttcaccaaatcctttttgatagtcgaagttatcacgcccgaccagcgattcatcattgaagacatataaaccccttacgccaaacccgcttcctggaacgccagcgccatagcgccgttgattgctttacgtttgttatctggacgcggatcgcgtttagctttgagtttaggcttgcgctgttcttcacgatgtttattgatgtacacacgacgcagaacatgtttcacttttggattttctgcgcggaaagcacgaattcgctcaatttcctgaacaatcacgtaaatgtcgccgttatcgagcatgtgctcacgggcgatctgtgcatagcccagtttcagatcattgaatttgaaatgaatctgtactttttcctgctggctaacttcgctgatattacgctgaacgattttcatagttactttcctttagtagaatcaattttacgaataaactctaacacttcggcatttctgctgtcaacatttttaagaacaaaagttacaactacatgaacaccggatgcttcgttccaaccatcagcacacgggatcatcagatcatccagagtgttgacaaggttttccatatccgcagggtgatcgacaaacaaagtttgcgtttcggtgatactggctttgaatcgtttcccgatctgtgcttcgagttcgtccagcatcccagcagataacgcggcgatgtcgatgtttttcattccaccatatacaacatgaaatagtttcatatacaactaacctcattttcgtatttttcgcgttcgaaacagtcgggttcgttccagatctggtcaaactcacgtttcgtcatgatatagccacgggcgattttgcgagttagatctgaaccgatcggagcataccacaaaatcaatttacacaccattccctgaaccagacaatcatacagccctttttccagggtgcgtacatctgttacgctatcgactaaatcgggggcacttcgttcaggatggtctttccactgactttcgatgatgtcgtttagttcacgatggaaatagatccacgattggaacgacgcatcaggcggatttgatttgcaaccagcaggataaaattcaagcattttgatcagcctcattcgcaatacagatcgccataaaggtaaacataacccccaacgcaaccatccagatcgcggttaaatccccatacaaagaagaataaccacccatcacttcaacgcgatatcccagcaagaaaacgagatacgctaacaccttatctttcataattcctcacagaaagcccatgcagcatgataaacgcttgcgcctttgtcatcgttcatgcataccacatctaccggacacacaacccgataaagtaccggatcaccacctattgaacgtgcagcccttccagcatagatacgagccagcccgatatcagcagtaaagaaaacacgatccagatttttctttctgcctttttcagacagagtatcagaatcacaaggaggcaacaacatgctttcgattccggcagcagtacatgatccgtgatagaactcaacgaactctttgcggcagtgaatggtattcatggttatctccttgttttcagagattacagcttatcgctattcgcccgacaagtcaacaaattctttttcaacgtcttcttttgttctgaacaggtaatcagtaaggctacctgtcatcaattcgcgagttttagcaactgaacgaacacggcgttcacgttggctttcggcatcaccaattccatgacctggttcccacccttccatatccaacataatgcgcgggtgcatcatcacacgaatatcgtttccatatgaatagctgttatattgcccgaatacaaatcttttgaatttttcgtggtgaacatcatcaacttcgacctgttctccgtagtaaacaatttcatcacagaacgcagcaagaacaagcccaccagagttttgaattttcaggattgcatggatcatgcggtgacgtgcttctgcaattatatcatgagagccaaatccaatctcttttgtcccgaagcgacagaaaatagaataggtgatgttcagcaggtatttcgcgacgatttgccattcattatagataggattgggattgacacggtatgctgatttatattcgcgacgcagttgaagaagtgtttctatgactttagcaacactccacccgttcggataagtcgaatcgttgcgtttagcaacagcaattgttgaatttgcgtataagtggttgaaagacattacgcggacgttatcgacgtaaccacgatcgcgagcactccatttgaagtaatcccattttggatcacaatctggacgcatagacggggtatgccagcgcttgaaccccaagagattacagaaatcgtcaatcagggtatcgcgacgggatttatattttgactggtcgccaagagcagcggcgttgatgaattcatgcagttcatttttcataattgttaccttatggttaaagttcttccggcctatccgtcgaacaattgcactataaacacactcataaaccgtgtcaataaatacttttaaataaacacctggagttctaagatgaaatcattcaaagactttacgagccttgatgaagcgctgatcaccttcggcggtaaggcttatcctaaatttggtcaggtagtcatcctggctggcggcgcgggttctggtaaagggttcaccctcgaaaagctgttaggtatcgaagggatcaccctggacgttgacgcactcaaaaaattggtcatgggtagtaccaaactggcagcagagatcaaagcgaaaactggtcacgatgtcaaaacaatgaacctgaaaaacccggacaacgtagcaacactgcatcatgtgatcgcagacgtgttcaacgtatccaacaaaaaccaggcgcgtgtgtacgctggtatcacagcagcaccggaagaccgtaaaccaaacctgatctttgacgtaaccctgaaaagcatgagcaagctggcaagtatcgcccgtgatgttgaagcgctgggttatcagaaagaaaacatccatatcgtttgggttatgaacgatgttcatattgctatgcagcagaaccttaaacgcgatcgtgtagtgcctaaagaaatcctcatggatacccacgaaggggcagcgctcactatggctaagatcctgaacatgggcgactctctgaaacagtacatggacggtgatatctggatcagcttcaacaaagtaggcattgacagcgaaatcaagaaatctgacaaaggcggtatgtttgtcgttaagtctaactacatcaaagttaaggcaaaaggcaagccgcagaaatccattgatcagcttgataaagagttagtggcgaaagttgcagcatacgcaccgaaaactgacacatggggttgacaacaggaacttatatgaatatgatgcacacacaaaccgaggaattgatatgaaaaagtttttgttcgatatggatggtgtactgtttaactgggaaggttcttttgttccgatgtacggtgacccggcgagaatgccggaagaagaattgaaaaaagcgaaacaggctatatctaaaactgacttctacgaaaatctggaaccacttcaagagggcatcgacctgttctgtcatttgagaactttaggtcaggttgcgatcttaaccagcgtagggaaatacaattccgatgcggtagcagaacaaaaaagaaaagcgttggtgaaagtgttcggttatctgcctgaattccactacaccaaaagcagcggagagaaagcagcatatgcggacaaaggtatactgattgatgacagggcaaaagctgtgttgccattcagaaaagccggaggtaaagcgattctcttcgttggtagcaaagaagaagcattgaaagaaatcagaaaaattgcataaaagaaagggaaccattgcggttccctttttttgtttatggtgtgtaatccgcaaaggagcggttcacatcctgaatagtgatgttcatatcgtcgttcaggaaaacactacgatatttccctgcgctatcccatgcttgacgatgcttatcattgcgggagatcagagggcaacggtaagcgtgggctttcagttcgttcagatcccgacaagtccagaagtctaaacgtacaatacccatctgtgcgcatactttatccatgtacgcgattttttgactattcacccaggacgggctttttgcttcgttgacgagaataaaaccgacttcgcgatcgcgataggtcatgccccatttcatcatatcccaacccaacacctcgatcgccagtttttcatagaaatctgtacgaaccagggacgatacagcagcttcatattctgcatctgtcatgttttgtgggcgtttgccaaatttggcttcgattgcgtcgctgaattttgcgaatacatcattgaattcaaatagtagcatttttaccttcttagttgttattatggtgcaggtttaacgtttaccgtcagagttgcagtaacagatccagaggttgctgttacgacaacatcaccttcactaaccgcatgaagtttaccaccaacgatagaaccatgaccggaagagtcaacactcagagtcatttctgtaccagaaggatcgatggtaaacagatcagttgcagccagatccgcatcacctactttgaaatcagcaggagcggtttttggtgtaattgttacgacaggatcagcaggagtaaaatcactcagcttatacagataaccgttgcgggattcgatgaaatcaacatcggtgtaatcaatatacgcctgtttcagtgtgtcgaattctttcgcgtatttttcttcggcataatcacgccagtcttcgcttgcagcattcgcagccacgatgatatcaaagatccaccacggcaaataggtaaagctggtgttacgccacgggatcgggtgtaccgtagtccatttttctgtagccattttcaaaacctcttagtttttctctatttagagaagtaaaattttgccgtcacaagacggacatttatcatattggttcacgcgcccatagccgttgcattcaggacagaacgggtttgttacaccgaacacattacggatcgcgtaagtggattgttcttctgtcagccctacgaacccatcggtattgatgaaatgttcactctgttccggtagcatatcggtatcgtcatcaaggataaggtaattcttacatccgaaggtgtcgatccatgctttgatttcatcaccgcgtcctgcttgtcggtctgttagattcgtacaggttttcccaatgatgcgatacaatccccacgggtagaagatttcccgtagagtatgggttgtgttgccgatcctccatgtagaggaaatgacaatatcacagttcgcatgatttacgatccggcgcaggtgtcgagcacattcaatgtccatatgctcaccaaatttcatgcaccgcatattatttagaacgccgtcgatatcaaggaagatgacgtttccgatctctttaccttctgataagtctttcaggcattcgtgatttaattcagtcatattttacctacaaaaaagggggcgtagccccctttgaattttaatagaaaccgcgagcttcgttatccaggcgacggtctgcaatcatgtgcgcttccatttggcgagaaacataatcaggatcgcattccatttttgcttcttcgtagttgtcccaggtatcagcaacccattttgaaccgttccaacgagcataaccaggttcagcagggacaggataatcagcttcgtaagcgtgacgcagtgcttcttcaacagtatagtaaggagcatttgaattgactactttcttcactttaccatcagcccaaacaaacagaactgggtagtaagcatttttcatcatttcgtttttcattttgctttccttcttcactgcgagagccattcccccgccttcgagtacaaatatactttaaacgagggtatgcgtcaacaagttttttagcaaaaagtgctaaaacttaaatgtttcgaatcggctatttctggtttcgcgaacacgaacttcgccatcgcgcacgatatagaacgcaagtgatttgattgtgtcgattgcgcttgcatgtggacagctatcaggatctttgtaccagtctggggtttgtttaatccagtcatagatccaccacggacaggtataatacccgttagaactcgcagagcgccccatcatgaagattgtcgggctaaacccttccaaccataccagttcgcctttggactcgtcagaagcgcttacaggagcttctacgacatcaggtactaattggatttgatcggctacttccggcgcgacctctttaacgtactccataaaatccgcagaagcatcaataaccacatcgggaacgttcggggcttcgatgacaggttcacccatagtcacctcacctttatatgcgacgatttccggttctggtgaatcgatcagcagttccggcttttcttcatcttccggtaaagcagcaaccagatccgccagcatgttatcgaaggatttttgtttgttcagcttaaccgcaaacacagtcatagcgtaatcggctaaagcgcctttctgttcttttgcgtcgagggtacggaacccatcaactttttcgtaatcaatgttcattggtatctccaagtgtttatccaatatttatgacataaatacgtatatactttgtacatagggtaatcatagtggatattgaagtcaaatttttaaacacaagccacgtacagattcaggcagaaccaaacattgtctatgaactgcgtgactatttcagcttccagcccccaggctatcagtatcaggccaaatacaaatatggtggatggaacggttacatttacttgatggactacaacgggaaactcccgtatgggttagcctatctggtatccaaattcgcagaatcacgcgggtattcaatctgggttgatccaaagatccacgaaactgaggatatcacgcaagaagattttgataagtgggttagcgaacatccggtttatgacggcgacaaacagatcgacccgtactggtatcaacgcgaatcagtgttccacggtatcaaaaaccgtcgcggtgttctgaacctgccaacatcagcaggtaaatctctgattcaggggcttatctctcgttggtgtctggaacattacagcgggaaggtgttgatcatcgttccgactaccgcacttgttgaccaaatgatcgaggacatcgcaaactatcgtttgttcccgaaatcggcaatgctgggtatccgttccggtacagcgaaaaacagtaatgcactgatttacgtttctacctggcaatcagcggttaaaatgcctgccgaatggttccaacagttcatgtgcttgatggttgatgaatgccacctatcaacaggcatgagcatcaaaaagattatcgacacgatggatcaatgtatcttcaaactgggtttatccggttccctgaaagaagggaaaacgaacatgatgcaatacatcggtgcgttcggtaaagtctttaaaccagttgatacgcgtcgtttgatggatgatggacaagtcaccaacctgaaaattaacacgatcttccttcgatacaaagaagaagaggtcaaaaaattgaagggtgcggactaccagacggaaatcaagtacgtaaccagccacacacggcgcaacgcgtggattctaaaattagcgctcaaattagcccgtgagaagaacgaaaacgcctttgtgatgttccggtacaaagagcacggaaaatggctgtacgagcagttgagcaaggtttacgataacgtggtgttggtcaatggtgatacagacattgacgatcgtaacgaaatgaagaaaatcgcggaatcgacgaaaggtttaatcgtcatcggttcgatcggggtactgagtacgggtatctcaatcaagaacctacaccacatcatttttgcgcacccttgcaaatctgctgttgtggtgaaacagtctatcggtcgtgtacttcgtaagcacggatcgaaagcgctcgctactgtatgggatatcgttgataacctggctacgctgtcaaagtctaagacagccaaaaataaatacagtgcgacaaactacggtatgaaacatgctatggaacgtgtgcggatctacaatgaagaacgattcgactacgcgatcaaacaggtagaaatttaagaggccaagatgaaaagttttactacattcgtaaacgaagcagcgattgatgatttcatgaataaggttgcttcgtgccggacactagaaggtttgaaagaacttgaaaagtattacaacacccgcgtgaaagaagtcgaggttgcagcatccgatgacatttcaatgcgtgacgcgatcaagggacggcgagaagaactgaaagccgaacttgaaaccggagaagaagagaagttttaaaaaagaagccccaaccgaaaggaaggggctttgttgttttcggctttattcagacaaccgttgtcttaaaaaggatgtgttcgttttatgtcatggacaaccttacaatcaggcaacgaggcgaatctttcgaccacataaccgcctaaatgactgaacccatcttgtcagtcccgtacatttattttatttcagtgctgtactattctgaattacaattaactggcctttactcgaaggtatcttaccaatcaccccaccgaaagtaaattctatcggacggcgcaaatgggtacgccacacggtaagcccaagccccacaaggggtacacatctatttactgctataaatctgggcgttcgtcttcgatacaaccgctttcaaacgaaattcgaagtgcatgaaccctggtcacacattcttccatcaatcccagcaaacgaaatacttcgttaaagtcgatttttgaatagtctttcatattcacacctacagcaacatttgaacttcgttcagatcgtcggcttcattgataccgcgatcattcctttcgttgagatattgcaaacatacgacaccgcagatcgggccagcttcattgacaaacgccgtattacgggagttcatcggttgtttgcacacaacgcatttgcaatcaaattcttctgccattttatgcaccactctcaagtttacggatctccaacatgtttttgatggagtagcctttgttcttaacgatatccagcgcttttccggtaaactctgcaatcagttcgaagtattggatcagcttgttaacttcaacggtcttaggatcaccggagatagcaattttgatttcacccgaaccagtgtaaatgacatcggtcatttcgctttcgtgtctaccagtgtagaacagtaaccgatcttttacaatcgcttctttcttcgcctggagttgaataagttttttcttagcattcgaatggtatcgaagccattttgaccaaatcttcggaatgtctgctgattcgctttgtaacttcaacggatcaatacgcatatcctcttcaagttcagcctgtagatcttcaagttttagttcagccatgtatcacctcaaaacaaagtaacattataaccagttagatcaagaagtcaaatctacgagcgaagcgagtacatgaacgaacgtagtgagtgaatgttggttaaaaagtatacggaaatgtactgttttctctatatataaaatataaatattataaacagtacatcgtacttacccatcactcacttcgttcgtgaaaactcgcttcgctcgtttgaccttatagatctttattactataatggtcttctcaaaacaaaacttgttaacccagtttaggtaacttaatacctacgatctgactcagcttagatttacctgcaagagcagaccaatcatcacctttgatcaggtgatcggattcgctttctgctgtgtatgggttcacggaaagaccgtaacgcatcagaatagcaactttcggttgcagggatgccggatctacggatactttgattgaacctgcttcatcagcttcggtatacggagcgaagaacagagagcctacgtgatccatatcacccagatcatatttgcaaccagtcagcatataatcgaacgggctgttggtgtctgtatagacataataaccgttgttcagcttacctgttgccagtgggtgttgttcgtcggtttcgtgcatccaaccagacgcagccagaatgcctacaacacgcgctgttgcgaggacgtaggtagcatcaaatgaagtcgttctattcatttcctgccccatttcacacgctaattggtacaggatacgacccaatgctggagcatccttcgcggtgtatgcggtagtaccgtcaaaaataccatccgtaacgagtccatcaacgttgtaacgtttggaaacggtgatcagtgtttgaataatgtctttgttgacttcttcacttgccacggttcccaggatgtcttcgatcaccccatcagcttcgaactggttcgcttccaaatcctgcatcagttcaaccgtcatttcggttttaaacttacgcgagcgtaccggaatattccagcgatccatctggaaggaggttgacgcgatatcttcactggtttcatacttagaagtatcagcggcttcgctaaccagtcgaattttgctttggaacacagctttcatgatcgcggtgtctttgtcagtatccagagtgttcagggtaatcggtgcgataacctcataaacaacgtcagtaccatcatgcttgaacaaatcacctttaacgtaggctttagtcagatcgatttcgtcgatgtctgtacgtccagagattcggcctgaataggttgcagcactggagaaagtcatatcaccattagggttgcgatagcgaacaccgaacagtgttgcaacagggagttctgtttcttgtacagcaaccagttcatgatagatcaggttgttaaccgcgcgagtcaaagaaaccagttctgggcgcgtgttctgtacgttgatgtcggtcgtgcctgttgcttcgttgataactttttctcgtttaccagacggaagcgaagactgacgcatcaacttgtgaattgtgtagtgtttatcactcatttctttggttcctgaattatagggagtatattgtttatttatgcaacgaatttccattcaggaaatttgtcactctttaaacggtaatcaaggccagatcgagaaagccccaacgctttagaagcatcggaaccgcttgcgtaaacaactccatctatcgacacagaacggcttattttggccttgtgcgcgtctgtgagcttagatccggttctgtcgaatgcagaacccttgtacatagctttgatagtctctgaacgcttcctgttggattcttctgattgcttcttccctgtttttatttttgaaaggcgttcttttacttctggtgtcattctttcacgagttcttttggagatttcatgtttcttttcttctgaatgaaacattcccagcatagggccaccagaaccacccacgcccatattgtacacatctggacgattgacgaaatctaggtttacaatctccctttccttttcatacatctcttcgcttgtatcaaacacgaacaagatctcttttacgaagttctcaattccatatttccgttgagccgctttgattgctttaccagaacccatgtatgaatcgttaatatcatctgtcgaatgtgcgccgatatagattctatcgtttatcttgtttgttattttataaattatatgtttcataatatagcctcaatagttttcattatttatataaacaaaaagggaacccgaaggttccctttaaaagtcgttgtttttcaacaacttataagcccttaacccacacgcggcggaagtatgcgtttttaccgcacatttctttgctgatcataccagaggtgatacgatctgccggagcctgagagcgagagttcgcaaacgggttgataccgataccgtaacgagttttgaagcccattactggctggaagttcttaggatcagaaccacgcagcggagtcagcgcaacgtatggagcgtagtagataccagcatccatttcgttatcacccttgtagcccacggtgaagtaatcctggcgagcgtactggtcgatgtacactttgtaagtgccacccagtacaccagcgaataccgctttagtggtgtctacgttcagagttttctggagaccctgacctgccggagtgatgccgctgtcgatacgagccagagcggaaaccacgttacgggaagcgatgatgaagttaccagcaccacgaccagtttgacgcgcgatttcgttcgcttctttgtcgatctgaatcagcagagctttatagctttcaccagcccaacgagcgccgcgaatatctactggatcttggaagtcaaacgcaccagctttagagcctacggtctgggtgaaaccagttttaccaatctgcgcggtgtagttgatcaggtcaacgatttcgcggttgatttccagcatgatttcagttgccaggattgcagacagttcggcgtcagcgtccataccgtgtacagcacgaagatcctgtgccagttcaacggaatactgtgctttcagttgacggctacgagcttcgataacctgtttgtcgatacggaaagccatttcgttccacgggttagcgctggaaccgttgaagttttcctggagttctgctacgctggtagccataccttcggaaatttcagccagagtgcctttctcgttttctgcgattacagcagcatccagagcagcagcatcagcaccagttacggttacgttgccggaggttacgttctggaagtacgcgacaccagtttcctggaatacgtgcttaacgatagcgccggaagcgatagcaacaccagttgcgatagcagcaaacgcggtgtttgcaccttcaccagaatacatggtgtctggagcgaacatcggatggaatgcttcacgaacgtttgcaggagtaccgccagccagaggatctttaccgtatacagcacggagtgcgaacacctgaccagtaggaccagtcataggctgaacaccgcaaatgtcgaatgcgatcaggttaggaatcgcacggcgaaccataccgattacagcagggccgatgttggtgattgcaccgctggatttaccagaggcaatgttggttgcgtcgtaaccgtggtcacccgcgatctctgcttccgccaggaaaccgccgaaggattcaatgattttttcgtcgcgatatactggatcagtatcagcatccttttcctgagtttccagaattgctgcaaccagttgttttttggatttggtagcgatatccggtaaaccttcctgagattccagaagatcgttccatttttccatcaattcgtttttcttagacattgtttcttaccttataagattaggaaagggctttagccgcttgtacatatttattgatcttcgatttctctgctggaggtgtattttcattcaccggaacaaagtcatctttagtggttgtctgagtagtggtactctcttcaacctgtttttccgctttagtcgctaccatttcaacgattgcggtcagtttggattcgaacttgtcggaatattccaaaccttcgatcaggttctgaaccttttcaatttgcgattcagtcagatcttttgttttttctgaaacgatggtatcgcgtttcatgttggcgatctctttagcctgagcctgattagcttcgaacaggcgtttaacttcctgctgattctcggtcagttcatcttcgagttctgcaacaacatcaacctgcgcttctgggataactacgttgtgttcaacgaacagttctttcattcccattaccagagattcgaacagatcggccttgatatcacgggatacagcttctttgttttcagagagccattcctgcgcgatgtggtcgaagtatttattcgcatcttcgtacagtttattttcgatttcgccagctttttcggcaacctgggcttcaaccagttcatcggagcgttccgcgatctgggcgatgtgggtttcagcgagtttcgcagcacctgcttttacagcttgttcgaatacagtggtgaagtttgctttcgcatcatcagaaagttcaactgattcgaaaatgctgtctaactcaactggggtatccaggttctgggcttctgccaacagttgttctttaagcatttctaagtttcctgtttgatatgatattatttatatagacttttcaaacgttcagagagttttctgaaagcgtcatcatcagcactattattctcaacaagcgttttgcttgactgagattcggtaatcggcttaacgtaagcatctggagcgcttggcccccaaacaacatcaacgcctaccgccaatttaaacccttcttgtacgataccgtaacctttaccagaatcggaaagtttacccagtccgcgagaagaaacacctggaacccaacctgcgcgaattaacgccgcgagtttatccccatcaccgttatcaccttcgacaacaacagcgcgaccccaaacgtcattacctttccaccataatttttcaattaggatgcaagcattacgcggatcgacattcggtcgcggcgggtgattcatttcacccagagcttgacgggtattaacctgagttctgatataatcgtttactgcttcttctaatacttttttcggatacagtcgcttattgcggttaactttttcggcctggaggaaaataccttcaatccgaagtttaccgtcttttttcgactcaccgaccgattctaaaattgaatcggaaatatccgcacaaggtaaaccccattcctcgattagcagcatatcgccgttttcattgagttgggattcattcatatttatagccctaatgcggcgcgtttacggagcgcttttttacgcttacgctgtgcgcgggttgtaatagaagggtttgcacgttttgtttttagcgcacgacgcgcaatttggcgacgttgagatttagttaaaccagttgtttgatacgcattacgttcacgggttttacggtcttttttacgttccacattaccgcgcgaatctacgtgtttaacaatgacttcatctaaactcaaaccctcgacaatggacatcatagccagggctaaatgaggttcattgaccgccaaattttcgatgatcttcacagtgccgtcatcgatccccagaacatcaacacgggctttcgcttcggttaaatggggttcgagatcttcgacgctgatttcttcgagttcgagttgcattatttacacctcttattcgtctttatcgtcgtcttttttatcagacggctttttgtctttgtcgtcgcctttatcatcgccgcctttgtcgtcgtcatcgtcatcgctgtcgtcatcgtcggtttcaccttcgatgcgtacagcttccgcgagttcaacgcgcatttcttggcgaagggcttcggtacggtcttccatgatggaatagaattgcttcttcgcttccaccagatcaccgcttttgattgcttcgataaattctttcatcaaaagttttcctcttcctcttcgggatttttgaaccgttcttctttggattcttcttcgatcagcttcgcttgttcgtcaatgtcttcatcagacattcgaagaatctctttcatgatgtatttatgggagacatatttcccaactacaccttcaacctgtgacatcaacgttaggcgacgttccataatctcaatatctttcacttccgcgtaatatgaatcctgctggaaaatgaaggaaattttactaacgttttcttcccattcttcctctgtgatgatttttttcgcgatcaggttagtttttaacggatcggaaagcacagggctgaactgaatttgcagtgtgcggataaacttactgaatttcagttcatcacgggtgatttcaccacccccaccaatttgcatacccccatcatcgcgaggcatacggcttaatggcacacgcagtgcttcatagagcttacggttaaaccatttgatatcatccatatcagagaagttcgcaccgcctggaagcgtgtctacttcggtgatagctttaccgtcacgacgcattaaccagtaatcttctgtcattgacaggttgttttgctggttcttaacagtacccgttttagcatcgtacacaacgcggtttttaagcccctgtgcgatgttatttacgtactgtgtcgctttgttgccacccatctgacctacatcgatgtagaacacacggcgttcaggtgcgcgggtgatacggtagatgaccatcgcatcttccagtaaacgcaattggtttgctggcttgactgcgcggtgcagatatccgataatgttgttactgcaatcttccagaccagaatgcgcatacacgatagcggagcgcgggattttaaccttctggttatgctggtagatctgcccgttgtatgtatagccatttttaggagcgctatacacgaaaaattcgcgataaccacggaatactttcacgccaccatcgagggtttcagtgatagattcgcggatcagttccatcgaacgcggatcaagttgacgcagttcgcggatacctttgctttcgtctttatgcatgattttatggaagtatatacgggaatccacataccaatcacggaacagacgcgcacccatgttatcaaaatcatagatatttagaacgttatcaaattcttctacgattttgtcctggattgccttactaaaatctgttttggcaagatccaaagtaatgatatctttgccctgttcattcacgatcgcatcgtcaataatttcagaaacagcgttttctacttctgggtaagacatgatgccgcgatatgtattgattaattgttctttgttctgaatcgccggatcttgtccagaataaaactgctggaatacgcttgcgtatttctgattagtcagatcagtttcgatttcataagcaccatcattatttttaggaggcgcgaccgaacctgtatcattttttaattgctgttcaagatctaattcgtcctcacgggcgaaattcttgaaaaagctaagtacattgccaaagcccaaaaagttcatagtaactccgaaaaataatgataggggtattgctacccctgtatttatagcctttattcccaccagtccagcgcgaaagtaacctcaaaggttgacacttcgttgttgctgtcccagtccagggtaacttcgcctacgttagtagggaaaagaccgtggatggtatgttcggcggtaatttcatcgttacggtttttctgtttcaccgtagcggtttttttgtagttcgctggaatatcaccactaatctgatcgcccattccgtgcatcatgtttgaccatgctaccagagcgtcacgcgtattatgcgcgtcatcgttatagatcgtgattgtccagtcatcataggtacggtcaccagcaacgttgattttgcggttttggtatcctaccggaactttttcaactgtagccgctggcatggttgccgctttacacttgaatttaaagtttttgcccagatacgggatctctacttcgaacaggttcggacgtgcgaaatcaccggattcaaaggcgcgtaaaatgtcagtaagcatttttaacctcggattatttatgggggcttttcagcccccttgacgttatacggcttgcggccctaccagttcatcgaaatctgcgcccgtagacgttgctacgaagttcagagtgatgtagttgatagaacgaggcggtttcacgtagatcgttgctacaaactcgttacggtcgattacgtccggcgtgttgttcgtggtgtcgcagattacacggtaatcgtagcaaccacccagcgcacgaatattagtcatgtactgacctgtatccatacggaacgaagaacgggtgaaatcgtcgttgttttcaaacagtttgtatttcgcgttatcaccgatgtctttcttgatcatgttgaacaagcgacgaacgttgatacggtcaaatggactcggtacgttagtcagtgttttatcaccgaacagaacgaagccggaaccacccgcgaaaccagttaccgggttaatctgaacctgatacattgcgtcacgatgtgctgtgcgcggttcgatagccagtttgatacagttgcggatctgaccacggttgtaacctgctggagacatccacggttgagcaacgctatcagtgtaaacacacaggccagcgatatcacctgccagcggaacccaacggttcacgtcattgtatttatcatactgatatttatagttaccatccaggaagccataacttgaacttacgttcaggttattgtcaaccggagtaccaccactgagtttatatccagtacgccattcaatgatgttatcaaccgctgttgccagtggaatattcaccatcagagagcgcggaggcgacacaaacacagtacaatcctgacgttcatcaccgatagagataacgtgtttctggacggtagacatgatctctacagtttcaccagcacacgcaccagcaatcagcagaggtacatgcagcgcttcacgatcagcgaacatatcccaaccagtcatcagttcatcagcgcctacagtgtcgtttgaggacaaaccaccgccgaactcaaggataccggagaagcctttaggccagttcagggaagtaccgtaaacgtactgagagccaccgttagcgaaaaagtcatccatgaagatgtttacgccgtagatatctttatcggtcttctcagttgacacgatgaaggattcctgtacaataccaccacgacgcacaacaaaagcgtactggttatcggtctgtggcccgtaggtcattacagaacgaccgctgttcttaacggaaaccccagaagggtagcctgaaatcatagctccagaatcgtaagcagctttggagataatctccacctgaacagttgaacccagttcaccaggatacagagccacgacagacgggatctgatatttctgggtaagagtctggaatgcggttccctgaattgtttcttttgcaatatccaggttcaacagagtgatccctgaatcgctttcgatgccgtcaatcgtaatagacgcggaaacaccggaagactgagaaacaatttcggtagtccagccagtagaaatatctgggtaagtaccaatctgtttagtacgggcaacgattttttcgcttgggatgattaccgcgaggatcttgccgttactgtcaactttggacactttaccgttttcttctacaacaacgttgttgtattttactttaatcacatcgtttacagtgtagttagaaccctgtgatgcaatagttgttttgatctggttaaaaattgcgcttgcgtttttagcggcatctttatcgacaacgcgaaccacacggagatcattaccgtactgcaagaagttaacagcactcatgaaatagtcagcggtcaagttgtctggggaaccaaaatagtttaccatttcgacttcgttagaaatctgacggatctgataagctggcccccatgaaaatttaccgacaatggcagcgcgaccagttgaatttcgaacaacggtagattgtaccgatgtttctttggtttcaatacctggagattgtaaagccattatagaatttcctctaatttatataaacgaaataccgtgagaaccaaccgaaatcgtttcatcaccgcttgtaacgataaccggacataatgcgtcttcgtatagctgttcgcgttcccgtgcaaaaacttcattggctagtcttaaatcgtctttctcgcagaattcggcaaatttcatttgagttgtaagccaaccgaaacaagcaagcgacataacgaggtcatcgtgatatccttcttccgcagcccacgaaacgcctttttctgagaaagtacgaaattcgagtattgtctttttgttatttatgatcaatttatctttctcgatcaggtctttcagcgtcgaacatcccatagcttttgatcgcttagtctgtttcatacccagatcgttgtagctgtcacaaataacattctcatattccagttcggaaaacagagatttggcaactgaatgccctgtgctatttagctcaatgtaaatccatgcctcgttatacatattcagataacgtaacaggatatccggcaaaataagatgcgacgttttgtttgagtgatacaccgcaacctgttcaaatggcatcgtcgtaatgtcgatgatatgcattgcatggtaatcctgtccgcgaccttccgctggatcaagtaccgcaacatatttatgcccctctactggacgtttatactgatagaagttcgtttccgtttcatcaatatcaatccatgtgagttttgacaacttccatccagcgatcagggttccactggttcccatgaattccgcgcagtgttcctgcaaaaatgcctctttgctggagccagcgatcatcttcgcagaccacgaataaccgtcatcaaatgtaccgttgtcgccgtctgtatacaatcgctctttaaccgatgtccagatcgccgtgtaaggcacgaaaccggattttccttctatagcagcgttccagatatcatagaagtggttaagcccgttaggtgtcgttgtgataaggattttcgatttacgaccagaagagattactggttgaatcgctaaccacgcatcaacaaagttcgggataaacgcgcattcgtcgatgtagatcatcgcgaaggagttaccacgcactgcatcgggagaagatgcaaacgcaccaattttacatttgttgtcaagttcaatagaacctttgttccattcaacaataccaggctgcaagaagtcgggtagtagttcgatcgcctgtttggtacgatccagaacttccgcagacatcgaggctttgtgagccagcacaccaacatatttatcttcgttgaaacacacgaagtgagccaggaagattgcaacaacggttgttttacccaactgacgcgacaggttacaggcaaccatacggtttttgtgcatttcgatcagcatttcgcgctgatagtcacgcaactgaaccttgattgtaccatagtcaatgtgggtgatcgcacaatatgtttcagcaaaataaacgatatcatcacgacatttcacccactccatcaacatttgttgcgtccatttagtctggatatacgcacgtttcaggtttgggttgccgttatatcgggttttcttgttgcctttatttttgtacgtggcaaagttcgaactgtccttagactgaatatcgaccttttgaatgccgttaattttcaggtagtcactgaacgttgtcggataccattttttatcgtgttcgctttgtgtccactccatccccaattcatcaattttctttttcagatatttgggatgcattaatccgatagggtgatctgattccttactcggatcgatcgtcggttccatttccatcagggtttacctctacagcttcaccattaatgaagccctctttgggttcatatgcactgccgtatttctgcatcagttccgtaggggaaccaacaaatacggttgcattctcgatattcatttcactaccaccaccgcccttttcagcacctggttttgtagtctcttccgtaatctcacgcatttctttgtgaatcttcatcaggccaatgtttgaaacgtttaactgattcatcaggcttgtgaatacctcgacgtggcgaggcgattcggagttcttcgcgttgtgtaatgcgatctgcgccatatccatgatcatctgattcatatggtgcgcagtcttacgcgcgagcgtataatcctcttccagatccggtttccggtctgctggatgtgattgaacgtcaaccagttcaagtttttcgtaaacaaccacatcctccccagactcaacgccgccagggagggaatcaatattcagcaattgctgcaaatctaatttttcatccattctcattccctcggcttaggaggttcatcaccagacgggatcggcttatcgtgcgagtacgtctgaatatattcttcgcccgtgtagtcctgcataggcaaatctaccggatcggcttgactatccacggattcgaagttatctttatctaacgggttcatgttagagaagaaatccgtgtaaacggttctgatttcgcccttgacatcagttacaggcgggtacagataaccctgtaattcaaacataaatgaccactcaacatgacggcgttgatttgcatcgccctcgaatgtggtatccggcgcaaccgactggagactgattttgatgtctcggtcaactgtgatttcgttcttatgcagttcggtaatcttgcagttgaaatgcggttgaaaatatggcaaaatctgttctgcgatctggaacatatcatcttcatatcgcgtatacacacccagttcgaaaatcagacgatatggcacagggttaaactgtgtgatcgtttttcgtggggttgctaactgtgtcattttttggttgaccgcgatactggttttacggattgcgttatattgcagatccaccagtgataagttcatgcgcggtaaaatcgtttccgttttagcaacgttttcctgactcaacgtgtagttaagtttgttcatggaagcgagaaacttctctttcgatgcataggtgatcggaacctttatgtatttttcttgatcgccgcgtactcttttaacctgaacgtgattaaaaagcgcccccatcaggacgatataattacgcagcgaactattataccagtatccaaaaattttctaatccccctgctggacgcgtccagacttacagttatcaaagtgccagcgcttcgctgtattagcggcgcacattatcccacaatgggggcattgtaccttttctcgttttttgcctttgtgagcagcaacgagacttgctatatgttctggtgatagcttctttcctttatgaacagcaccaattctttttctgaattcttcggtatggtttttcccgtaaaatgggttgtttttaccgtcatgtttacctttcatctgttcttttttaacaatgcgcattgcttttcgcgcctttgtcttttcttcaagaatgaactgctgttcttgttcagataatgatgaataacgtttgtgttcataggtgaacatcatgaagaacgcaagaatcattttaggatcattggtttttgctaatgtcctatgggccatcaaatgcttcattatatcaagttctactaaattttccggttcgtgttcgaattcaggaaataaagaacgtggtaatatgtgatgtttttctgtgtgttcagtttttggagaagcctttatgatatcaacatactcaacgtatagatcatgaggcaaccattctttaagttttgcgtatatcataaaatcctcttcgaagagggtatagactttcgcctatacccatataacgtatttatggcagacttgcaaacggtgaaccgcgtccgttgacaacatcaaaagattcgatgaattcatcaccttctctttcaaattctttgtcttcttcgtactgttcaatgttgatatcagccagcccgtcaagatttcgaatcggttcgagatccagttctgcatcaggttcgatatggattccttcatttcgctgcaattcaggagccagttcttcaccagtgtagatgaatttagccaggttgattttacgctgaggacgatcaccgaactgatagaacggatcggcttctacccacgtaatttcaaacaggctattgtccatagggaaataaaccagatcccccagaacaggaataccaccatcagtttgatgtgcgaacaaacgagggttaattaccagcgtcatttcatcgtttgaactcagaccaaatttactaaagaaatctcgttgtccttcatagttggcatacgattcaatatatgcagcaattttccatgacttcgtaaatttggattctcggtcttcgcccaggatcttatcaatattcacgaagtcacgccggacgtaatacatatcaggcgatttcatctggattgattctgctgtcagtgaatcatgtagctgttgtgtcgggttgtatttgtaccagtttacatacgggttagtgacctgatcctttaagttgcgatcaaccccttcccccgtagacaactgagcgaataaactttcatcccagttttgcattattccccctacaccataatgatcggtactgcgtcagacatcgaaattagttcatcgcgcagactttgcagtttggtttccgcttcctggatcagtcgcgtaccatcaggagcaacaccgccaggcaattgcattccctggaacttagccagaatttgtccgttgatctctttcaccagtgcggtagagtagtcttttacccagcggttgttatatgcagacgttccgcccgtaacagttgaaccctgtcccgctcgtacaccgcctacaacgctgttatacgggttttcgtagatgtcggctatggattggtcttccactgcgttagaacccgctgtagcgtatcctgcgacgcttcctacggagctagggacatcaacgaaggaacgaaccatcgcttcaataacgataatgtcacctttgttcacctgcccccatgcgcagaactgaccagtatcatcgttgaaccagtaatcaggcagtggagccagcaggtcttgcattgagcgttgataggacatcatctgggtaaagtagcccatatccgcgccgtatgcgttcataccgtacacactcgatgcacagcgcccacccagagagccaccagtcaaccccatcaggaaatcggtaaaccacggataaaccgctgtaccgtccattgtggtcaatgaacccatgtttgtacgcaataccttcgtgatcgcgaagatgtgttctttgctcaagtcgaacacgttgcgcgggttatcatcacccagtgtcaaaatcagatacgttttgtttgtgccgttataatgatattctgcatacaggtctaaagcgcgttgaatgcagtcataaatctgatcttgtgtgatttcgattttgatgattggtgcgcccagacgacgaagaatttcatcctttaactgttctggattattcgtaatcatatgatcctcaaaaggggcttgcgccccttgttaaaattatgctaccgttacagtcacagtcgcggttgctgaatcgttggtactgttcatcgcgtcagttacggttacatagtaatcacccgcatctgcgctggttgcagcagacttgacgatagaagaaccagtttcaccactcaatacagatccgtctttatgccatacgtaagtgtacggagttttaccaccgctaaacactacttccagagtcaatggatcaccatcaacaacagaaatatcactcaagtttgtatcgaactgaggaaccgtatgtaccgcaatgtcaagttcatcagaagtaatcacggtattttcagcgtcggttacgacaactttatatacgccggaatcactcgttgtgatgttctggataattacactcggtgaatcagtcccgatatttgcggttcctttcttccactggtacacataaggcagtttaccacctgtaacggtaacagataaagaaatagcatcaccctcgatataatcgttacgaccgaccagattttgagtaaatgacagtggaactttcttcgcttcgtatttgttatccgcttcaacttctgtgatatacggaaccagagcatcagtaacatcctggtgagaggctttattctgttccagttcgtccagacgttgttcaacgttaccaccaccgccagcttcgagagcagcaacacgcgcagtcagatcggaaatcagtttataaatccctgtttctgatcctgtagtattaacgccgatcgcagttttgttatcgcgagccgttttctgaataccatctttgaggaatggatcagaactggttgcgtcaccataaacagctttacccatcgcgatattagccgcaacgagtccagttgacgtattacccacaattgcggtaatatcaaccagtacctggtggtcgtcgcgctgtgtgttttccaggttcagaatacggcctttcatgctcgttggctgtgaatctgtaccgatatcggtcataacctgtgccatttcaccgcgcagaccatcatcacttgtttcaccaacgatcatattcagatcgctaatgctacgtttcattgtgctgatatcgtaacggatactacctggaacctgtgagttaccaacagcgctttccagaaggattacgcgaggcagaaccccaacaaccggatcattcatctgggtttgcagagtagtaatgttcgtttccgcagtttccatgcgggaatcaatactaccagaaccacctgagcctgtacgcccgatataagtgttgatgtttgacagttcggtattaataccagtgatatcgccaccgataccattcagacgaacatacacagattcgaaagtggctaaatgcttcggccccatttcgttacgcagatcggtaacttcatcggttaaattacctacatctgagtttacccagtcatcttccagcttagtaatacgtgcttcatggatagataccgcctgagcgttagccattaccttgtatttcacgccggagccagtagaggacggatcaacatcaccatcttcgttaaagccaggatatgcacccagttcatctttcaggaaaataatatcttttcgaatggtacgatgtttaggatcggttgacgcatcccatacaccaatttccttttcgatatcctgaattttcagggtgttgcttgctgtagttgcctgtacagcagacatatctactttcagcacgtcaacatcagcgacaactttatccagtttgtcgatcacactatcatcagagatcgccgcgaggttttcagtaatgaggttaacctgatcgataacttcgttgatttttgatgtctgggtagttgtatttgcttctaattgtaccgcgttcttttgaaccagaacaccgcatctgtttaaagaaccctcgttagtggttttggtttttgcaccatcgagagtttcgccgttaacaatccaattgatctgggtttgtgtggtgtccgcagggacaccatcaacaaacgggatctttggtaacgggttaagttttgaaatcatggattaacccctttatcgtactcgaattacgtagttgaccgcaaggtttttcattcgcgtttcatttccgccagtacctaatgctttgctgtaatcgttattcaggtgcataacacgttggtcatttttttccgcgcctttcagttcataaactgcttgactcttaggaagattaccgccgttctggtaaatcatctggagatcatgttcgtgatacgcaaacatatcagcctgatatgtaccaaaaccgcgacctgcatctacaccacgtccaccatcaaagccgcgagctacaagaccgcgcatatcaggcaagttgaaaatatcaccagaaccgccgtatgtataaccaattcgggcaaacagttctgggtttgaattgcggttcattgctcgcccgttacagataaacaagttaccaacatcggcgttaaacgctgcaagcatcatacatccgatcgggatatttgcgtcaacatctgtctttgtctggtatttattgtcagcactaatcgaaccctgatacaatgcaccaccagtaattgcactgtttttgttgctcggtactacgttagcaccagcagacaaagcagtattcgctaatccggtattgatatctgttgttaatttaaccataccgaaagtagagccggaacccttcacagcagcgagtttttgcggggtgatcgctttggtgttatcagtacccgcgtttacttctgcctgggtagcgatacggagtaaacctaaatcactttcacttgcagtcagacgaataaacgtgtatggtgaaatcgcaaacccatcgcgaatagtacctgcgcgaacttctgcaacagttgctaactgaacaagaccaaacgaactttctgttgcgtttgcctgtaccggaaccagagcagagatcgcttgcttcactttaagcggagtcattgcggtagtgtcatcagtaccggatgttgcctgagcagttgttgacagtttcacagaaccccaaacgttttcttttgcatggcgggtgttaaacacatagttcaacgagcgcggagtaagagaaaccagatcgtttgttactgttactgattctgcatcagttgcgtaacgggtgtaaccccatacggtttgtgatgcatgggggttttgcagacggtattccagcaaagcaggagttacgatcgtctgggtatcagtacccgcatcaatcattgcctgtgtcgcaatagcagcaataccgcgcacaccaggcgcggcattaggcaaaccaacatcagtacgcgcccacggcccaatagcggctaatgcctgttgtacgttcttaaacgtgctaggccattgcgtaccagcaggatcaaatgtcacgtaaacggatttatcgcttacgtggttaattgtattgttcatttgttatcctcatgcaatacgcttgaaataataaatcggaactgctggagtaacagcaaggtcaatttcacctaactttgtccatgtaccgtaaccagatttagcctgtacgtcgattgttcctaccatcgaaattccatattcagttttattagtaaccggatgcggaactgaatcaataaaacgaacttccagaatttccccgttgagacctttacgagtaaccaaatcgaaatatttttcatcgttgacgaattcaacgaatttgttatagactgtctcacatacggtagaggcgttcgttgtattgtcgaaaacgaacgggaaaccataaacgtgaatagtcgcctgtgtttgatctggatctgggtttgaaaccgtcccatcaaacgtaattgattctacctgttgcaccgcagaaggggggctatcttccgtcatcatgattaccccattgatcgggatctgctgagacaaagaatacaggtcatcaattgctgattgtacgttagggtaatctaccccttttcgaagctgatcgacgtttgcaccaccaatagtacgtttaccaccaatcagcggttctttcgtacccatttcatattgcaaaaagtctgcttcgcgggaagggactttcgccccctcccttgttttggaaataaactgagtcatttatgctacccttatccagcggtgaacagtaatataaggcgggagcgtttttagtttatctggagtagtgttcccccgatttacttttaatacatcctcgcggtatttagtgtaacctggccctgttgcatctgggtcaacctgacagccaccaataataatgatcccgttgtcatctttaatcaacaccttatcggttgactgaatttgtggaacgttgatcggtttaatttcataaccacgttcgccaccagtaccaccagaagtgtgagttggttgaccggaaccatccagatcgttattgttcagaccaaaatcgctatccgatgcatcggttgtccaacctgcaaggaacataccttccgcgtaacgtgaccagataccaaagcccatataatcgcctgggtttgaatcgttgtgcgcgttttcgtagactgtcccgattggatgaataacatcaaagaacgcttgcagatccaacagacgaccgctaaatgtatccgctactttacgagcggttttctgcgttgggttgttataatcggtatattcgatccgattaaccagcgtcacttcttcttcgttgttcaggtaaatcttatcggtgtgttctttaataccgcctacaccgtcccattccattacagtaccgatatcattgttgaaccatcgaatagttaccacatcacgggattccagaggttgagcaaatttaatgcccgtaaccacggagtcaacaaaaatcagactgtaatcctgtccagaaggaacccacgcgccggagttcgcaatacagctatcttcatcataaccttctgcgccctcacaaacaaatgtcgggagatccgcatcacctgctttaacaagctggcgaccgttcagcagcagttcgaacgagttcgggttaatcaaaattcgcggactgataccaaattcagcattagtgaacgtgcgtttgtttggtagatcaccaacccagatttcaccagggatactaacctgttctgtgtctcccgtgttatatacgcgcatggtatgcgcttcatacgtcgctcgccatgcggcaataccatccagataggtaacgaattgaagcgtgtcaccagcgttacacgggtttttaagacggatatttacaccatccagatctaccagttgtccggcgctcgcaccaggtgaaccgtaatcgctgtttgatgaattaaacccgttcttgtcgtcgatgtacagcaagttaccgcgatagtaaacttccagtgcgcggacgttgtacgagttaccagggccgaacacgttcaggaagtcagtttgtccctgagtcgcgatatacgtttctttcgcaacggttgccagatccgaagttgtgattttgtcaacctgtttgttttcaacatattcccaacgtccaggagaacaataaacaagttcaacgtccatcaggtctttgtacagttctttgtaagtcggtgagcctttgatggtatcaccgcttgcagggacgatacggacgttgtttaccgcccacttaccccatacgtcacgtaagcgaataaccttgttataatcacttacactgcctttagggaggtttaccgtaatacggttgttgctggtattcagcgcccatgattcaccgaaaataggggtcagcgtaggcgctgtgtgcgttttccacgcacccgctgggtgcgggatactcccgtcacccagtttattatataactcggtaaagttggcgttagtcttttgaccaccacgacgcagataatcacctgcgccgtcatcaaccacgttaccgataagaatttcttgtttcatgctgcgatccctgatttaatggtgtcaaccgctttaatcgagaatttaatgcgattctcggttttggattgtacgtttgcgtaaacaatatcactcgcaccaacagtgaacgtaagcgtgtacatttcatcttcgctatttttgagaactgcgtattcagttgaatacacgcccttagcgacacggtcaacagacaaaagaatttcagccattttattgactgtgcctgtcatattctccgcgtacacgagaattttcgccccactgaattcactataaccaaataaaggaattgcggtcggtgatgctttcagaatgagtttagtagtatctacaggcattgtttttgaaccaaacattgattcaacagaataatcccatgtagtaacggaaccttctttcttcacacaccagattttaatctgagtatatggagaggtcacgtaaagttgatcctgaacccctttgataccatcaccaacttgcggacggaatacaacaggacgatcaacagaaatactaccgttactatttatgaaatagaacccttcgccgggtttacccgatggaagcacaaccgtaattggccctgtagaggtatccatatcatgcagtgaacccagttcaatcgggtttcctgaataataggttcgcggtaatttctggaaatatccggtcgcgtggagtaacattgtacccacaccatcattcgcagtcagtaaacgcacatcaccaaacgcgttgtatacgttggtgatgatttcgttaagtttaacaccgccgtcatacagcgggtcgccagttgacgggttgccgatttgccccacgtcaattaattttttaccagtttgatatgccattatggtttccttagaattcgaaaataatactgacttcttcggtctgatcaggagaacgaataatcggttgacggttttccatgtagatcatttgtcctgagtcaagttcaagctgtcctttcgtgtaatactgcctcgttgcttttacttctgggtcggatggttgcgcctttttcaacagcgggtttacaataacgctgatttgacggaacccacggttgccaggtaaagaggcttgcgggaagaacagggaatccatatacgcgcggaatcgcattgagtgaaccttcattcggtacaccaaatcgtacatatcaggataccatttgatcacgttatcataaccccaacgaaccgggtcttcttcaagttcatcagggaacggaacaacgatatgttcatttgtacagcggttgataacaacatctggtggaattgtatacagatattcccagatatagccgtcgcccatgtcgataccgttcgcttctccgcgtggaggttcgatcgattcgtgggtcggtgtccaaatgccaccaatacgcacacattcaactttacccgtgatactggagattgaacaagagccaatatcaggaacgtctacaacgcggtataccatccatcctttaccgtagtcagtacggttatacggcgcggagtttacaaccacgatgtcattaatgtaaaagattttggggtttggatatcgagtatcgccccagtctttacgcggaacgattgcatcaatcatttcgcctggtactttcgtcatcccgatcatatgcgtccacatatcaacgataccatctgtatcatcgttcggataagggggagcgaattcagggtcggattcgttatccgcccattgttcggtacgcccgattgacatataaatcgagttacgatcggggctgtccccgatcatttcgcgaaagttcatcatgttttccgtgcggaacttaccagttacgaccgcacggtagatgttttgttgagccattatgctacctttctctgagtcggtggattcggatcgcgaggattacccgcatcgtctttcaatcgtttttccactaagttacggaactgagagtatttaaccgctgaactatcgaacagaggactttgatcaaatcgacgcgcggacggcagtacaccattcagcggtttttcatcaatgtcatattgtggtggaacatcaaacggttgtcccgctttcgggtgcgggtcgtacaatgcttcaccagttacaaggtcaaatgtctggtttccgttaccgtccagacgggctacgcgatcaggccaatacttcggataaccgctatcgaagcgataatttcgaagaatgtcaatgatcgtttcactatgcgtcatagacaaaccggagttgatgaacaccgttagcatggtgatcccgataaagccaaagcctaccggatgcacgaatcgtaaaacgtcatccttataacgggacgctggcagattcgaacgaattttcatcacgtagtaagaacgcccacggttgaagtagtcgatcgagttgttcgccatttgcttaccacgcacaccacgcagaatagttcccgtgaagttagtcttttcagacttgacaacctgcccttcaaggaagttcccgatcacgttgtgcagcgttactgaccaacgtaattgaccgtcatcatactggcgttcgatatacgtcacgtttgctctcgctgttggtgtgtaaatcgtccggcctacaatatcctggttgatatttgttgaatgaaccagaatatcatattccagagtgttcgaactttcgatttctacacttacatcttcgttatacaacagtttgaacaggaatttatagcttgcttcgatgcctttcgttgagtagaaatcactacaacgagattcaaagaaacgaaccacctgatcacgcttcgttttatccaggtagatattacggcggtttacttccgaccacagatattctacgctgttcttctcacgcggatatttgttcctgatcaggttcagcagcttgttatagtaggtgttttcacccagcgaaacgaactgcaaatagtattccccgaacttctcgaaatactgctgatccagatagctttgaggcgcaaagcgcgtaatcatatggcttaaatctggggcaatcaaaccaggtgacagatccggttgatacggtttttcgcgttcctgctgaatcagatcggcaatcaataacgtattgtctggtttccagaaaatcgttaagttgtcgcgagcgcggtaactcagttcaaagaacccgatgatttctcctgaactcttatacagcaacacgccgttcgtatacttcgtgaatccggtaaacttaatgttgttaatgtaaatcgtaacatgtccgcgatcccatacctctttgttcacacgaagcgatgacgaagggccagcactatcggttacaaggctgtaggtgattttcggatacaccaccagaggacggttatcattagtgatccatgtgcgcacagagtcgcggaagaaccagctataattcgcctcgttgtagtattcctgagcaccaaatttccaaacagtcgggtcgtcgatatgagcgcgaatcgtcgcaaagttaatcgcaaggctggcagtatagccaggacgcaaatcatattttacagcaccaaccagtgcagggttctcgatcaacaattcaggatcgggaagtgtgcctggatatttgtagttcgctacggaaataaaaatctccgtgccgttcgttgacatattggtgtattcatgctggatataaaaacgttcttcctcggtgttcccgtacaggcgcacaaaggttttcgtgtcttcttgccattgatacacaccagcagcagcggacggaaccacgttagcgggttttgtaggatcttgcagagcggttttcacttcacccgtaacgagtgcataaagaatcccgttcatcacatccattttcttgacaacgatcttatcatttccagggacaactgtatagcttgctgtatcgaaaatcttttctccgaacgttggagaactcggatcggtgtcgatcggtgtctgtttcagcgcgatacgacgcacaacgtttttcgcaaccacataaagccagtcatcggaacatgccattgcttctgcatatttcgacacgttaccaggcagtttagcaaacgtgttgtatgagtctacgtcgaaatcaaggccagtctggttccccagtttggcaaacgtaacatcatcagcagagaatcgcacatcgtccgcagaccagcgaatatccgttgaggtgcgcccgtagaagatacgatcgtaacccagtacataggttgtgtttcggctttggtacgcaacagagcgcgatacagggtttcctacgcggtcgttaaacgccttgtagtaatgccatgtttgtcctttgtcgtttgacaccttcgccatgttctgaaaacgttcaaacaggtacaataaaccgtttgacgctaccaggaaagttctgttaatgtcattacaaacgtgttcaatatgatcctggatttcgtgatagttttcttgtgtaagaattttatcgctgatctgggatacgtcagtgtaaagtggagaaaacacaaagtcttctttcatcaacgctgccattaccacatctgtattgaagttaacgtagttctgattgtcctttgcgaatttttcgtttatgaatgcatcacttggcgtaaattcacgcattgttgaatatgcgtaggcgttaaggctgaacgtccataattcatctgtataaacccaatcagacggttcaaagcccttgtgcgtaaccatgacgcggaatttataaaaattgtttggctggacatcggaagaaaaccattcattcaaaaaagcgtaacccaactggaaccaggttaaatcttcatctggaatagtaacaccacctgccccgcgagtttctgccatttccacgacatagtaaaaatccatgccgacgctatcccacttcaaataaacgaagttagcagccagtttatcaacgcgcaaactggtaattgacggcgctttaatcattatgtttctccaaatttgcgttacttatatcccatatttagcaaacaaaaaacccctgccggatgacaggggttaaaattattgactgattggattcattgtcaatgttgtatattgaggacggagatcgttttcaaacacaatcagagaaccatcacgggtgaaaatgttctcttccaatggtgtaccagtcagttcgatataagcagcgctgaatcgctcggatggaacgttcaggacacccagatcgaaactaatgaaatcagtgtagtgttccacatagccgacttcgtaatatttattacgatcggtcactccaggatatttatcaaaatcggttcctgtataggctgcgatactgatatcaccgtttttgaatggcccgataacaatttttgcacgtccggttgtggtgttcatatcggttgatgcataacgcacatcatacgaatcaccagcagcgtttgtgtatttgaacccgttcgaaacaacagaacgtgatttcacctggtttaagaagtgaataccagacatcggagcgctgtaatagttatcaagttcacgcaatagctgaatagtcgcagaagaaccaatgatcgacacgtccgcgttatcaacataggttaacattttggacttactgaatgatttgttgaaaatttcaacgttatcagtataatatctgtcaacctcgttgattacttgaccacgcaaccattcctctgattcaaccaacttactgatatcatacgttactttgatgctttgtacgatgtacagatagttcgggtcaaggatcgacggcgtaatagtcgcaaggttatacttcgccagatagttttgcatatcctctttttgaacagaggtcaagcgcaaccctgatttcggtttaaccgcgatgaacgcatagccaggtttttctttatcagtaaagcactgaaccgcctgaataacagaaccgaaacggtgagacaagaacgattcataatccgatgcagtaacacaacggcgttgtgtctcacgcatgataggcgcgagttcgcgaatacgttcgatatcttccggttcaccaccaccatcagcgcctacatagtccgctgaattagtcgggttctcaacaatactcgtaatgctaatgtttgtcaacgtatccacgtaaacaaagttttcagcaccgtttgcttcttcgccgttggttgaaatatattcaataacaacggttgaaccgtttgcaggtttcaagcccccgatgtaatcagcagtcagagcaccacccgcgacctgttggctggtttcaccttcaccaaagtaaacttcggtatgtccatcaacagtttcacgcatataaaaaacagttgatgcacccgttgcgtttacgatactttcgtttgtccagtcatcccattgtgcgccgttgacggtaacgcgaacctggctacggtcgatgtttggatcgcggatcaggatagtcgaaccatcaaagatgacttcggtacgtactaaacgcccctgaacgatgttcaacatcgaaacatagttattgtttttgtcacgaacgatcaccacgtcatcggatacgacgaacgggaaactgtttgtttctttcactgtaccgatgaatttcgtaccgcgtggaatacggatcgatgttgggttcagtgggtttttcgcagtgatcaggatcgaagtatttgcagcggtgcgggagtccggcatatagcccaaatcctgagcctgttgaacaacagaactacgcaatgcagcggtacgaataaacgattcgaacagtgcggtgttactcatttgctgaatgtacagtgtacagtatgataacagatccacaagtacgttcatgcgcgagccggagaaatcataatccttgaattcgtcctgacctcggagccagtttattaagtcagatttgatttcgtcaaaagtagccccgacaaagatatcggggatctgattaatttgtttctttgtagtagccattattacccctcgttatcgggtatttagtattgaaccatagggacgcaaacactaattgaaccgaatgtgatcgcgagtccgattaatgacagtaatttgtttacgtattgagttaccttacttagagcaagcgtacaaatctggttataaatcaccttgcatgtgtccttaaacgagcgggaactgtcaacaaagtttttatatagcgattgtgcgcccgtcagcgcgttctcatacgtttttaacaggtcatcgaatgcaaccccacagtaacctaagaactggttaatctgagccattacaggcagtttcttgagttcagccattgccatgctgtaggtgtctttcataccatcttgcaaagtagcaatctgtgctttgattccctcatatgcggccttagtcgcattcacagcagcgttagcggcatcaagtgcagcctgataagcagcggttgttgctttcgttacaggttcccacatccagtttaggtactgatcgaacttgcgtttaatcgaatccctttcctgtgtctgtgctttcagggtgttgaatagttcttgtccctgatcatacaatgcggagatctgcgcataggatgcatcaatgaacgctttcaccttcgcttgcgcttgctgatacagatccattgctgtaaaccctgggaagttaccgcccagaatcacatcaagcggtttaatctgccgcatgatgtttcggatagccagaaccgcagaccaaagcgggtttggtgtttcaggaggcattgaccagatctgcatcatacgcccgtacaaatccaccagagcaacgcaaccattttggaacatagtcaaacaccagtcaaataacgcactacacgcgtctacaaggtcgcgagcgccagccttgacgtattcaacggcatagttgtaagaactgcctatagccccgtagattgcgtttatgacgctttcatacgtttgtgcgccggaatcaatcagagcctggaaagaatctttcagggattgaaccgaactatcaccaaacaccagatcgtaaatgttgatcgcaacacccatgatcgcaacagtagggaggaaattcttgatcaaatcccacgccccgcccacgatgttaaacgcagagctaatgatctgtcggaatactttcattgcggtttgccatgcttgctgtgacaatgccagagcacccgctgtgatttcttccatcccgatcgaaagcccgtcaaacatcgtcgcaatgcccgtaccgttcttaatcgtaccagtcagcatatcaaaagccagcttgaacgttttacgagtctcgttccacgcggaaagcatagcatcgctgatattcgtatacgggaaccctacggtcgccggaatacagcccaatccagaacgagcagaaaacaatctggcttcactcggtagcgccccatacgttgatggtaacgccggaggaaccggaggaatgcttgtatctgcgttcgtgtttactgacatccctgtatacttgcactggtgcgcgggggattcgtcgtgtttcatgtacgcaatacgattaccattccagtagtaatcaatgctggtaaacgcgcctgtagtctgattgtatacctgtcggattcgctgatcgcaacgggggccggaagttagcaagtaaccaccggagttttccaccttgtacattgcgagttcgccagggttcttgaacagattcgcttttgatagatccgccccgtaccagtcattacccgcgagcttagtagccccgatagatgcgatataggcatcaatatccgcttgactggcgaaataataaccaatcttcgtaaccagaatgtcagtagaaacccctggggttccgtctggattcgtgggtacgtttggagagttcaccaccggaagcggatcgcttttctgtccgaaaggggaactcgtatacaggtgagttccgatcgggatgatttcggtcgcccattctaccccaacagcagggtaattttctgtgtgtccctgccagataacgcgtctgtaatatccagcggggatctcagcatcgcaaggatgctgaaagttttgcataatcccatcaatgatggtttcataatccatgatcatgtttagcctacctgtacagtaccgccagtgatcttagtcagtgcgccggaatcaatgaaagtattattcgatgctcgcatgttgatattacgtgcgccaatatccaaatcttgctcaatatcaatcagagcattttttgcggtaattgttgcatcttctgttacggcaacggttgcattctgtttaacgttagccattaaattctgattcacgtttacggttgcatctttttcaacggttaattctgcgttgcctttaatcagccccaaatattcaccttcaacggtttgatttacattaccgcgaacgaactcggtcacgttaccatcaacggtctgttgaacgttacccatattgtaaatgaacgcatcaccctcgataacaacctgtaaattacccttaacgtttaatttacggccttgcatgacgatttgataatcatcaccaacgattttaacaacacgggttccatcagggcgaatttcttcgtatgatcctgctgggtgaacacggttgtaacgttcaaagcctggtgtatcgtcgaattcctgaatgtgtccagaacgggattcgaataccatgttgtatggatattcagcagcgtatgcggatttaggttcctcgaacattacgcgagtatcaccaggaacaaaaggatcttctggatttgatgcagccaacacaacagcattgtatgcagcactcaatgaacgcccttctggatctggaacctgaacaccgtatgattcgaggttgcccgtcagcacgattttagatacgcgtgaagaacgtcctggtgtctggttagcccatgttgagtttcgcagttcgttgtaagcggtttgccagtcctgacgcttcatagcagccagagcattagtaaatttggcaacaccaccaacacccatctggaagcacatgttttcgattgccatttgacgaggacggtttaacgtcacgtatacttctcgaacgtttgaagtgttgctgatcccctgccggacttttgccaaatcctgagcaaacagcgttgaaacttcttctgctgtgatcgttccattggttacttctcgaccaactgctttactgatcgcggcgttaatcttcgcagtatcacgggttttttccatgataagcaaatgcccgatcccgatagtcggataaccttcactatcaatataccattttgtgcggataccttcatcctgtttaagcatggtttcgatagtgaacccgccagtatcaggacggttatcttctgggatctcgtcaagtgggcgatcatctggattgacagctaacgaactgttagcatcgcgaataataacgctcgaagaaccgcgcccctctgcgccaccacgagccagtacgttgacatcgttacctacataacgaggatactcgccaaacgggtcacagaagcctttctgggtgtccggcttctctcggtactcacccgcaaaggttcccagtataacgccgtcctggtgccatttatcgcgccagtaaccgataacaaaactaccgcgcgtgataccagtcggggaaaaaccaacaccagaaatagcggcgctgcgaatatcctgaataggcatcatccacggcaattcctcaaccggaataccgatagtttcagatttttgtttctgtgccggatgctcaccgaatacacgcacctgaacacgccccaatagacgaggatcatcgacttcttcgaccaccccctcaaagaaaggggagtatttatttccaccgtatttcataggtttgccttttccatttccttgatataatcacttacaaacgattgaatatcagaggggttaataatcttgatggttcgttttgcttcattttgaagcaccgcatcttcataaatatctacagggactaatgttccctggtactgcaaataacgcatgttcttatcgcctttgtcataccaatgaccgggattgttcgggtcttcaaccaaattgtaataacggttgcccttaccatccatatgataaagaacctgttcaccacctgcttttgaataacgctggatagcgcattgataagccgtttcctgatcggtaatccatccgtaaaacggatcgtaattatcgttaagcatcaggataacccagtagtattgctggtttccgtatagcgtttccgctaattgttcgggtcttaatgaacctgtcagttgatatgtacgcggcttataattcctgatcacgcggttaaagtaaaaacgataatcgcggtagatatcagtagttggtgtgcctttgtaatcaactggtggaaagaacgaaaataacattgtaatttcccctatctaatgtttactatatttaggatctaaaatggctggaagacagacatacaaggggtcttttatgccccagaacatacagaaatataagggagatccgcgaaagataacgtatcgttcaagctgggaaaaatatattatgaactggcttgatagaaacccgcatgtgaaacgctggaacagtgaagaggttgtgatcccttatttcagcaacgcagacggaaagcgacggcgctacttcatggatttctatgttgaaatggataacggcgtgacctacctttgggaagtcaagccgatgaaagaaacgttgcccccaccgaagccagcgaacaacaacgttcacaacaaaaagaaatttgttgatgcactgtatacttatgcggtaaacattgacaaatggaaagccgcgaatgcagcagcaaaacaaaagggctgggagttcaagatcatcacagaggacacattgaaacgtgtgttcggatggaaagggcaataaataccctaaacggagggaattatgagttttatttttgagttcgagatcatcgcagaagaagacaagccaaaaccaccaccgaagcgaaagctgggtgaatgggttgaacttggtatcaaattccgacgcgcaaaattaaaaggcatgacagccaaaaagttcgcggacgaaaacgggattgcatacgcaacgttcacaaagtctatgcaccgctataagcagcagattgatgatgaaatcgaacgccgtaaagcagaaaccgaagcccgacgcaaacgtaatgactatcgcaaaaaacacgcggttgatatcgtaaacgatttccgcaacagtttgaagaaaatgactgttggtgtaaccgctgcgaaacgtcagaaagattcgaccgattggtttggtgatttcatcaaaaccagcattaagacgcacagggttgcgaaaccagcaacgggtcgcttgtatacgttcatctacgatgcgaaatacaaagacacccttccatactgggatcggttcccgctgatcattttcctgggttcaggacgttcgaaagcgggtaacttggttctgtacgggctgaacttgcactatgcgccaccgcgagcacgtcaagagtttttagaagaactcctgaaacgtggctacggatcaacagatcgactttctaacaaaaccagactgaaaatcaattggaacaacgtgaagggaatgcgcggggctgatcaaatgatcaaagcatatctgccagcccatctacgttcaccacttgcagagatcgccccaaaagattgggcgaaagcagtttggttgcctacacaggctttccagtccaaaggaaaaccatacagcgcgaagaaagtttggaacagatattaacaaaaagccccaaccgaaaggaaggggctttatttttacagggtactcacgatttccgcgagtttgccaggggttgcgccaggtcgaaccttcatcgcatctttcaggtttttatcaaccatcttttctgcgtctttttcgttaaacccacgtttcaccaacaccgcaataactttttcgcgaatatctttagcggcttcgttcaaatcttctgattcagctagaaccagtttagacagaacatcacctttgtattcctgggtaaagcgtttacccgataccagacgaggtttaccagaggcatctacaaccgtaaacacggcgtattcacctgtttctttggttttggtacgtccggtatacagcaagcacatatcgttacttgggagcttgtacacctttcctttcaccaatgcttcatccagaggcagatcaatttcgaaatcttccgccaactgattatacagatccaggttttcttctgcttctttgtacagagaagcgcctttgaatttcagtggcttgtcgaatttcaggtcatcagcaggatcaccgctgtagaatgaaacagtacctttcgcccagtcaatatacgctgcctgagtcttgccagtggttttacctttcaggcggacaacacctttaccgaagtaagcgagatcgtgggagtccggcgcatacacatcgtaatcagcaccatgtgcgaaatgcaggaaaccgatctgaccttttgcagcgttaccacggtcaaccagatcaacggtcttagcaaattttttgttctgaacagattcagaaagtagttctttgaatgatttcatgttttcaatctcttttgaaagtataggtatagtatacctatttattgaatagatcaactaaaaattagatcgcgagcgaagcgagttccgtcaagcgaagcgaagacggatagttaacgattgtataaaaagtatacggaaatgtactgttttctctatatataaaatataaatattataaacagtacatcgtacataacactcacttcgttcgtgtgttcgcttcgctcacggtcttgatctaaatatctataaaatggagatcatcatgaatacaactgctatgatcctgaaccagatttcacctactaacttcatgttagatattcctgacaatgattatgtaaaagggttgaaactacaagttcagggtgttacactacctgctatcaacattccaattacggatgtcccactgaacccaatgattcgagggaagatcccaggatctgcaatggagttcgatccactgactattcgttttgctgttgatgaagaactgcgatcgtatcttggggtttacctttggatgctcggtactgtcgattttaacaccttcgattccgtgcgttggagtgaaccacaacaggcaatggctttgcatatcctggataactcgcagtcaaaaactgtagcgacatttcgcttctatggcgcttggccctccaacctcggagagcttgagcttatgtataccaatgattcggatgaagccgtatcctgtatgacgatgttcaacttcgctcacatggaaattgagatcgacggacgggtgatcgtgcctactccacggaaaacgcaaaaatgatttatggtatttgtggtaaaaagcgaacgggtaaagataccgttgctcaaatggttgtgcataacttccgtaatgttgaagttatcgcgttagccgacgaaatcaaagctatcctgaaacgttctatggaacatcacgataacacgcaattgcgagcgctggcagcgaagaacccattctatgagggtgatcgtgaagccccgctggtgatgtccaataacgatgcatacgcgctgttttctagcggtatcaaaaaattaagttctcgcgggttcttcatgagtaacgcagatgttatcgctcataaaatttgcgaagaaaacagccagccctggacgattcgccgtttgatgcaggtgttcgggactgatattgtttgtaaaatagatccgtctatctggacttcaattgcacttcaaaaaatgttgaaatcctacgcggatcactttatcattaccgatgtgcgtcaaccgcatgaatataaatacctgagcaagttcgggactcgctttgtgttccttgaacgtgaaactggtattgaagataatcattcaacagagcaaggtttgacacctggcttgagtgattatacaatcctaaataatggtacgttagacgatttgaaacgcaacgtgcttaatgtattcaatcttttaagagtgtaaacaatgactgaacaaaaccaaacccaacagcttcaaaacgatgtcctgatcctgaaagcccgtgtattcgacctgaacgaaatcattcagggtaaagaacaagaactggcaaatcaccgtcaactcgtaggccagatttgcggtcttctggaaatcgacggttcgcagggtgtatcccctgatgccctgatcggcgcgatcaaagcacttctgccagcaacagtagaaatcgctggtgataatgaagcgattgatgcatcaaaagcataattaacgcttaggcgtttaaccactgggggcgaaagcccctttttcatttggagtacacatgaaaagttttattgaagtagcgaaacccgtagttgatccggggatctatatgtgtgcgaagttcgatcaggcttcctgtgaagcgctcgcgaaggtgcaaaaacttctgggtgtagagaatcctgtttccgctgcaaagctgcatacaacgattgtgtatagccgtaagacggttgatctgttccctgcatccggtatctctgaacctgcccgactggttgacgtggagaagtgggaaacgaaatacggtaatacgatcgtgggcgttctggagtctgattatctccatagccgctttaaagatgcaatggatgctggagcaacatacgattatgacgattacaaaccacatgtaaccctcgcgtatgattcccgcatcgaagatatcagcggagttaaaagactgttgacattgcctgtagatttgactatcatccaggaagatgctgaaccgcttgatcttgataagaaagtcgaagacatcacggagcacatcgaacatcgcggcgataaatgggttatactgaaccatgatcgcacgaaagaacttggtgaatatgattcgaaagaggcagcggaaaaacgtctgcgtcaaatcgaatactttaaacataatgggtgatttatgaacagagcacgattgatgtatgttatcaataacttacgcagagaagttaaccaaaatttcagtaaagcgttaagtgattggtatgtgacaaaggtttcaatgactacagatcacatcgcagaccgattcctggatcgttccgcgtcagtcaaaaaagactttgcgatctacagtgaaattcttaatagtctcgctaaacattattcgtgtaacgttctgtattacgcggtgaaagcgaaaaacgaaggtatgcaggaagtcattgcatatcgccggattaatggcaaagtgtttgcctgtgcgttcaccgtccagatgttcgaaaacatggatgattcggttgctcacgaaaagccagtgattgctttacgattccgaaccgttatccctgagtacacgttgagcctgaacacgcgaaacgcgatccatgttaattacatcgcacctaaaatcaagttcgagtatgacggctacagacgcgttatgtcacgcctggatcgcctgattgcttcaaaagattgtccgcctcaactacacatgttgaaaaatatttgaaaaaagcccttgcattcgtgcaggggcttttgttatattaggggtgtcgaaacaaaggaggcaatcatgaaactttactggctggtgttctcaaacgggtttgtaatgaaaggcactgttcactgtgcgaaaacttattgcaaatggaatgaatgctctttccgtatcctgagcgttgcatcttctcaacctgtaggggattactaatgactggtgataagtgggttgataaaactttgttgttgacagtaatctactttctggtaaaatacctggtgtagacaaaggagggagttatgagaaacttactgaatatcgcggaaatcttttgctatggtgtcgctgtgtatgtcctgtttaacggtgacggcgcgggatactggatcatgttcggtggtggattgttcctctctttcatcaaaaaattttttaagtgagaaatatactatgcgctcaaatgtaccgaaaaacctgtataccgttattgatgctggttcgattcgtattgctgatgtaatggcactggtcgaacgcttcgatcgttcaacaacgctggggcaactgctgagtatggttaaatcccagtacccacacaaatgcccgaaatgcgagggtaaagggttcgaagtcaaacgtgttaacacgtatccttctggcttaccggattctggctgggttgatcagatggaagacttcaatgttacttgtgatatctgtaacgggcaaggcttcactaaagaacgccttatcgcaaaacctgtcaaagtggaatatgtacccgcatgaaaaacaaaatctatgctcatatgtctgagcacacaacggttcgtgttatcttggtagatgggccaatagctcaagtagaaaccaacgataaacctttctcgttgcctttacaaaccagtgtcggtactttcgatgaagttatcgaagaattgacaaaacatgctgttgtttatctgtgggaagcgcaaagctatccgtacccgactcctacaagtcaggcgtcagaagataacgtaaaaattcgttggggatatattgaatgaaaattaccgatctcgtaaaagcggctaatgcgctggtgacaagcgaacattacgccaactactgcgagcaataccctgttcccctggaacgcgcaattactcaatccggttatgacggtatcagtaccgtaaccgttgaaaacctgaaaacgttcatcgtgtttgctaacacgttctggatgtacttacccgataatatcggaattcgccagcctacattcttcacgctgtgtatgttctgcgaaacctatctcccagaatgcgaggattacgaagaacattatggaaaaagtgaataaagtatccctgatattcttcgatccgaaactcggtatcacgttctgtaacggattcgcgccgaacgccgaagaaatgttcaggattgcatttagcaatgaacctgataaactcgataaagaagtgttggcagagataaacaaaactggtacgctgtattatgcccgacgcaacgacattgtgaacggcattcagtaccaatcaaccctcgaaaaactcaaaactgaactgaaagaaataggtgaattatgacttctacagctattcaacaacaaaccattgatcatgatgctgaattcgcacaactgatcaaagaacataacgcttttgcggcttctcgcgtcaatgaagaaagcgaacagacccgccgatccctctgggttgccatttaccgcgaagtgttcagcgagaaatccgctaacaaacacactcaggcagttgatgcagcagataaagcgctggcagcatacgatcgtaagttcggagcacagtaatggaacggtctgctggtattctcttcctgaataacggcagcgttttaatgggccacgcaaccgaaacgcctcattgggacatcccaaaggggcatatcgaaaaaggcgaatccccgatcaatgctgctatccgtgaatgcttcgaggaaacgggcgttgtagttgaacaacacgaactgttgagcctgggtctgattgattatacgagtaaaaaagagcttgtgttattcgtatatgtgggtaataattaccccgaagcagaaaaatgtgtttgtgcttcaaccttcgttaaaaatggtcgaaccattactgaaatggatgacttcaaatatgttccgtatagccagatccgcgatcatgcgcgtaagactatggggaatttactgactaaacttgtgggatatacatcatgaaaccaaaagcaactactttccaaatctgccaaatgatccttctggctaccgcaacccgcgccgctgaacctatcgcgtataagtcatggggtgattcattcaccgtgaaaaatattcgcgatcttccaggacgcctttacgcttcccctgatttcgaaccagtcgatccaaatgacctgactctggaagaaatgaaaaacctgggcttccgtaagtgggatgacgattcaaaaatgatgctgatccctctgtatctgttgccgtacctgaaagatggtttccgtgctatcagtatcagcggtgaagaatttgaattcagcactggtgaatcagataacgatcatcgtatggggctgctgtcattcggtgcgatgcctaatgagtcacgttgatttcaacaccttatctcaattggggttgatctggaaaatcaataaagatatcctacatcccctggggctggcgttgacgcgtgatcctgaaactggcgtatcggttggtgcgctggtttccgatgatggtgtctggtcgttcagcgaaaaatcagactttgagaacatagcaaagctgaataaactttatgctttacaggccgaaggaaagctgttagagttcttacaacaaaacgtgaaagagtgattatattatgaatggtgaacgtgtaattgtcattggcaagtcgaagcataaagctaacgcgaagggtgatcacttgatcatcaacaccgatcgcggtgactggtacggtgcaacgcaagtaacgagtggttatgcaaccatcgttgaaaaagatgcagttcgtcccgcaaccgctgctgatcctggttactatggaacccgtgacgagttcgaaagtgaaaaggaccaggagatcgcagaactgaaaaccaacgtgcataacgcgcgggtgttggcggtgatctgctttaccgttgcggctatcaatactggtttgttgggatgggtgattaatcatgtctgatgaaattgtacataaccgacttcgggaactccgaacttttcgcagtcgcgatcatgcgatcatggttgggagctatctcaactggtggaagcataacgatctggatctgaatccatcctatcagcgcccctatgtgtggacgcagaaagagcaagatgcattcctgactacgttaatgactggtttcccttgcggtgtcatcgcgatcgcggttgatagtcagtttaatgaaactcactgggtagaagtcatcgacggcaaacaacgcctgacaacgattatcaaattttacgaaggtgaaattggtcttcctatgccggacggttcccgattgttctgggacgaattgccacgacacgaacagcgaacctttgaaaacatgtcattacctgccctggggctggatgaatgtaccaaaaaggatcgtctggaattcttcatcaaattgaacttcgcgggtgtgcctcaatcacaagagcatatgaaccgcgtcctggaaatgtataaggctgcaaaatgaacaaagacgaagaactgtatcaggaaacagcggattcagtagaaccgaaccagtttatcatcggtaaagaagatcatgacctgttgcaagcggttaaaaacttgctgacgtatgctcatatccgcgtaccgaatggcgataacgcaaaactggaaatcgcatgtgctggttatggttacaccgctaccgctgataaactcattagctattccgcatcaagaacccgtgaactggttcattaccgcgataaattgagtgaagaaatccatcaaactcaggtaattgtagatcagttgccaataaatttcgaataatatcaaaaaagcccttgcagcaatgcaggggctttgttatattacacacatcgaaacgaaacagagaaaggaaaatcatcatgaacatgaacaaaaacattgctgctgttgttggttgtgaagtttctaacgccgaacgttatgacaacggtttctctttctgtgttgcgaccgaactggaagcatacaaagccgcttacaaataccgcactatgccgatggtaaacgttacttacgcgcctaacatcgaaatgtggctggttcaggtttacaacaaagtatgaacttccacgaacgcaaggccgcacgaaccgattattacatgcggttcgtgtatggctggaaattacggaaatgtgttgcatgtaatggatcagggcgatatgatagcgaccgatctccgaaatgcagttcatgtaacggaaccggaaaagaacgctttaaacctttgaggaatatattatgcaacatgtgaatctcaacccaaaaatggaacagtatctgaatcgccgtcatgatagccaggcgcaaaaggatcaggaacgcgcgatcaacattgaaacggctaaactccttacccagatgttccgtaagttccctggcaaggttaagcattcaagcaactgtatcagcgtagaactggctgataagcgttgtatcagggttaacctggcttacgggttatccgaagacggatataacctggtgatgggctggacatcaatgattggcaacttcgttgaacagaacaatattgagttcaatatgatgcgctctgatttgttccagtgtccggtcgattcaatcaatatcggtagcctttacgctatccttcgcgcacaatatgatttgtggagtacaaaatgaaagtaacaagtgaaaaacttgaagaaattgaaaaatcagcccgttcgatttcttctatgatgggtagtaagtggactctcgttgaaaatatgagcatccagggaaatcaggaatatggtttcaggggcaaagagtataaacgagcgttctcatatggtgttccgtatggcgacagcccgacacagattaaaagctgggaagagggtctcggaaaatatctcgaaactgtagatccacaaacggttctggatctggttagcgatctgtcactcgcgcttcgagacaagcaaaaagcagaatcagaagccgcgcactggaaagcaaatcacgaatgcgaagtatcccgcgcccgtgtcctcaaagagcgccctgatatgcctctggagcgcgtcaacgcatacaaccgtatggttgagttagaagaggaaaacaaagccttaaaacagcgtatagcgagcctggaggatgtcaatcaaacccgcatgatgttgcagatgattcagggtatggtgattgatacccaaaacatgaaccgcgaacaactgcgctactggcaaacacatttccgcaatcctaacgggtggtaatatgttcggacgaaaacgagaatgtaaacatgttgctaccggatggatgcggggaactccttacgcctggatgcatcattccgtaaccgatgggatcgggcgtatacatggcgatatgtatgcaacatgcgacaagtgcggggagaagtttttgatgtgtaagatacacgttgaccacgcgatccgtgagctggcaaaacatccaatcacccgcgccgaaatccttcgaatcctcgaagaaacaaaataacactttttgtttaaaaagccccttgcaaccgccaggggcttttgttatattacacacatcgaaacgaaggaggaaatcatggaaatcatctacaaaagccggaactacaaaaaagaagatgttgtagcagtttacatcaagtaccggaacgtgaaatgtgagtacagtggggcatggggttatgaaatcgttgttgaagaagtcaatgcagacaacaaaaccatttgcagtttcaccactaataccgatagccctctgttcactactgaacagcttgaacaggcttatgaactgcgcaaccaggcttttaacgcggtacgtatcaaatgagattccgtccttatatcgaattccttcgcggtatcagcgagatcctgaaccgcgaaatcaaacccagtccattagccgttgagctttatcgactggacgcaacccccgaagatgcagcgaaagattacggagatcagttataatgttaacttttgaagagtacaaagcacagcgtgatcagttaagcaactggtacagagagatcggcgcggagttgagcgcataccctaaaaacgaaatggggatgacgatcgaatcaatccgtaatacgccggaatacaaagcgaaacgtgctttgtgcaacaaggttttccaacagcttcgcatccttaacgggaagtacatcaaaacctacaaaaaagaactggctgacgaacgtaaactgaaacggagtgtaaaatgatgcaacacgaactcaaaacagagattgacaaacgtactttcctggaaaagaataaaacggtaacgctgatgcattactccaccaaaaacggttcgagtgagttctggcgcgttaacattgacagcaaagagaaacaccagtcgataccgttcgacaatgaaagccttgctcgcgctgtcttccaatcccacgttaaattttgagaattatattatgaaatctgtcgatatcgttaccagcatcaaagcgccgtccctgttcatctatcaacacggcaatatgcgcttcgctcgctcgaagttctacaactataatttcaacgttgatactggtgaattcgctcgctggggtgcaacatattcccacgatccagaatacgcaccattccccgaaattctcgatatcgagatcactaccaaatgcaacgggccagcgggtaaactctgcgggttctgctacaagtccaataacccgaacgggttcaacatggatcttgccaacttcaaaaaaatcatcgacaaaatgccctggcttactcaatgcgcactcggtgctgatgcacaggggcaaacaaaccctgatatgttcgatatgatggcctatgcgcgttctaaaggcattgtgccgaaccttaccattgctgatgtatcaaaagatgttgcagcgcgtttagcggcggttgctggggctgttgcggtatcggtttataaacacgctggctttgatgtcgctttcgactcggtagcgaacctgacagaagccggacaacagcaaatcaacctgcatttcatggttagctcgaaaacctatgatgatgcgtttaacgtggttgatgccgtgaagaatgatccgcgccttaaagaagtcaacgcgatcgtgttcctgggactgaaacaaaaaggacgcggtaagaactgggacaccgttacccgcgaacaatataaaaaacttgttgaatattgcctcgattctggtgtaggatttggattcgatagctgttcagcccccgctttcgttgaagcgatggagggacacccgaacttcgaacagtacaagcaatacgccgaagactgtgaagcgacgatgtttagctcttacatcaacgaacgtggtcagttcttcccttgctcgtttaccgaacgctgggttgaaggtggctgggaagaaggtctggatgttctggaagccgaagattttgtgaaggatatctgggaacacccgaaaacaaaacagttccgtaaagaactgacgggcaacaaggatcataacggttgccgtaactgtccggcttatgcggtatgtggtaaagatatgcgcgtacacaaagcccctgaaaccgatgtatatgcagtggagttgaaataatgttaatcgtatctcgtattaaatcatacgttcgtgatcgtgatattctggacgtgtcgcctttggttggtgaaactgttaccgtaagaaactatccggtgaatctggatcacgtaacctggatcgaagatgatgcaactatcgttgttgaagggaagagacacccagcaatcacttttcacctgatctgttcaaccccgattacctgggctggatatgaaaacaaagaacagcgtgataacgctatccatgcgattgagcgtagaatgcagtttgcggagatcacattctgatgatttatcaatcccataatgattcaacgatgcgaatggttccggtatctattgacattccaacaaaaccgcgtacactggaatcgttgattgaaaaatactctggaatggttatttgtccttctaccgcacaggtggcaatggcagaacgcgatgaaattgtatttgaatgtgatacgaaaggttatcacaccgttgaagatatgcagatgattgaatatctctggggaatccgaaacgctgtagtacatcacatactgaccgctgaaaagaaagccgaagccgtgagagaagttgaacagcgcgaagagatccgctataatcggatgtctgcacaggaaaaggatgaagcatatgaagtgtaccgccgtagtcgatgaattaatgagcgcgtttaaaacgcgccgtacagatgggcgtattaaagatccgaagtcaatcgcgatcatcgaacggtacgcgatgaagttaagcgaacaggaattcacaccaaaggcactcaatagcctgatggttctgaaactgctgatcgcttcgggtgacgatatgccgcacgatgaaaacagtgctgaatcattccaaaaggcatatcgttcatggggagtgatttactcccgctcgctgggttcgtatgactcggttatgtggaacctgatgcacctggatcgcctgatctgggaagtgctcgaagaagagggtattgtatgattttcacacatacaggaatggttgattctaataaaacagggcgtagacgaattcctttgatgaagtccggcaaatactggaagagtgaagaacataagttcgaccataacggcaacgctttcgggccttacgatgctcggttaaaacttgattctattaaagagattaaatcatgaaactcgatcgtgaattaagcggagcaatccgcacccttgagaaagtgcttgatgatttgagcgcgggtgaagagatcaacgttagcgacatcgaagcaaagctgtatgaatggcgcggtgcgctttacgaagcgacaaagggcaacgatcctctgttcgatgaatatgatgtgtacaacgtcaaggtatggaacactgaataccgtttcaagtggcctagcgatgcttacgggcatattcaaaccatttacgtaactggtggtatggtgtttgcgaccagtgttggggctagtgaacttccgatcaatcccgatagtaaagtaacgacaccgaacccattcggacatactaccgtttgtttgggtgtagcggaggacttctccccgttctattcaggctggatcgaagccagcaaaactaaccttaaaagagtataaattatgtggaaaattgttgtgtgtattttgatggttgtcgttgttgtgttcttgcagtcaagctgtactgacgagaaagaggcacagcgtatcctggaagcacagggttatacgaacatccagttcacgggttacaagtggtttgcatgttctgaaaaagacacatactcaaccggattcgaagcaactggtgtgaacggcaagcagatcaaaggatctgtgtgctctggaatgtttttcaaaaatagcacaattcgtttcgaataactgttgacactaatccccgttgtgataatatctctctcgtagacaacgaaacagataaacaaggggattaaaatgaacttactgaacgaaatgctggaaatggttgaagcgaacaaagaagcaatgaaagcgaaagaaggttgggtagttgttactgactgcttcaaaccgcaaagctggcttcctgtgttcctcaataaagatggtaacgaagaacacggcttctatgatgcggcaatcttcgaaaccgctgaacaggcttgcgatttctggtcttacctgagcggcgacaagcctttcaccaaatacggtgtttgccagtgcaaagacatttaatcccagccccgaaaggggcttttttgtaggtgaaatatgaccaaagcagaaagaattatcaaccatcttcaaaccggattcccgtaccagggagatttacagcgcgatatcatcgaactgttatcccagcatgacgggatggaagcggagataaaggaattgactcaccctgacgtgaacgtgttcgcttcactgatggatgatgtgattgctatcgactcggacgaactgatctgcatcgagacaacgaacccagaagataagacgatcctgaaacaagcgtatgaacggatcgaagcattacacgatcgccttttcacgttaactttcccaaataaaaacgatagaccttgttgacatcaaaacagattgtggtaatctgtatatgaaaactaattgtgaggaatacattatgaacgcttttgaaaaacgtgctgtcctgaaagatatcaaacctggcgcaatcctgtacgaagtaatcagtatcactggtgaaaaggcacagatgggtcgaaaacatatcatcactggcttcccgcgtgaacatcgtgggctggggctgtttgttaacggaatcactgtgtatgatgattgggaaaataaaggtcaattctctctggatgatcgtaacgtaactgggcgcaaccattataatttccatgcgttgttccgtagcgaagcagatgcgcaagcatatattgaacaaatcaataatgataaacttcctcctgatgacaaacaggagagtgttgaaatgacgattcgctggaaacgcgatcgcgcggaagatgcaatttggggttacatgtaaaacgttgcgcctcttaaaccgtaaataccctgtgtagcccatagggtattttcataaagaggtatgtatgtttaaatttagtcagaaaagcctgaacaacctgcaaggcgtgaagccggaactggttaatgtggtaaaacgtgctttggaactctcgcctgttgattttggtgtacgcgaaggtctgcgcaccgtagagcaacagcgcgagaacgtccgcaagggtgtttcccagaccatgaactcaaaacacatcactggtgatgctgtggatctgtatcctagcgttctccctgctggctggcagactaacccgaaagtgtggttgcctgtcctgaatgcagtgaaacaagccgctgatgaacagggcgtaaaactgcgttacggtatcaactggaagaacgatccaaaccttccgattgaaacgaaatttatcgacgcaccacacgttgaacttgcataaggcgacaacatgatttcacaattctatgttgacgctgtaaagcagtcacgtaacctgcaccttgcgcgaatcattgatgggcgttgggggcaagaatgcggcggtgtgtctatcttcgaaactgcgctggatatgggccggatgtcgggtaaaaccaaagcggctttcgatatcatcaagcagtcgaaagggacactgaatatctacgttgcaccgacaaagcagatgggtatttgtgctgcggtagaacatggactggataagggcgctgattcgtctttcattctgtcgaaacgtcaagatctgacttccattttccgtggacaaaccatcaagtatcaggcaatcaacctgattttcgatgaatgcgacatgacgatcgacgaacggtttgaactggcaaaaacgctgaccttgtgtatgcgttcaagtcatcttcatccgttcccatatatccatattatccgtttgggtatgtaatgaaaagtcatggttattcatcaagaaccatacaggaagagattcaagggattgagtctcttctgagttatgtagatgttgatacatctacgggaaaagtgtattggaaaattcagcgcggccctatgtctcctggaagtgaagccggaagcaagaacgagtattcccaaattcattttaaaggttctatgtatttgcgacaccgaatagtgttttacgttgagaatggttatcttcctcctatcgtagatcatgtgtatggtgttgaaaatggagatacagcaagaaatctacagaaagcgacgaaccaacaaaacgcgatgaaaaagaaatgtaattcaaacagcagtacggggttgaaaggtgtttcttatcacaaagcaaatgggaagtacaaagcgcagataaacatagatggaaaaagaaaatttttggggtattataccactccagaagaagcaaaagccgtttatgaccggaaagcgaaagaggttttcggtacattttttaacgaaaccacataaggttaatgtatgtcaaaatacgtattagacaccaatgttttgattagtaacccatattcaatctattcttacatcgaacctgatagcgaaatcattatcaccgctgcaacgatggaagaactggatcacctgaaaagcaaagagcgaaccgctcatgaagcacgattggcgatccggcttttgtccaaagcaatcctgggacaaaattatgaagcaattacccaaacaggggtttcgttaaacttatcgaacccagcagtaccggaaagcgtaacactaaaaatcgtcgattatgacggcaccgaagaattccctctggataaacaggatgcgcggatcattgcaacctgtattcaacagggcgcaacgctggtgactcgcgatattaacatgctgttgattgcgatgtctaaaggttgtccggttcttcaatacactggcgatgactcgctgaaagatagtgatgtgttgtattcaggttatatcgacctgccgctgttctgggaaactgtcgaagtcctggagtatgtcgggcctgttgccgttataacgtattcatcgcttcctgacgcagatttctaccctaaccaatacattctatcggatggtgagattgtggggcgtgtggttgctgctggagagtttcagcttgaagtattgcctattaagcacgaacaagcgttaaagcgtaagctgatgaaaacaattcagccccgcgatgctctgcaagcgtcattcgttgatgcgatcctggataagaacaatgacgttgtgaccatcatgggtgcggctggttccggtaaaacaatgctggcggttgctggtgcgatgcacatggtaaacgcgggacacttcgcaaatctgatgtatgtcaaggctgatagtccgctgtctggtgaaatcggtttcttgcctggcactctgggcgaaaaactccgaccgtctgttgagccttgtatcacgagcctgaacattctgtttaaggatcaaccggaagttgacaagtacgttgaaggacttctggaaaaaggtgtggtgcagttccctagcctgtattacttccgtgggcgctcaatcgggcatcctgatccgggtaaaggttcggttctgattgttgatgaatgtcaaaacttgagcaatcacgaaatcaaatccattatttcccgttgcggtgagaacacccttctgatactatgcgggaacattaaacagattgacaacccgcgaaacactgctgttaacaacggctttgtgtatgcggttgaaaaacttaaagagtacggtcattcaagtcatgtgattctggataccgtatatcgtgggcgacttgcagcttttgttgaagacaatttttgatcaagggggcttcggccccccttttttcgtgaggtatacatgatcaacgttattatcagtccaaagctaattaccgtttgcgctaattgcaaaagtgggttagagtatgaactgtctgatgtacagaagaaaaacgaagtgttctacaacggtttcttccgtgctgctgattacatcgtgaaaaaacatatcgtctgcccgaaatgcggtagcgaagtgaaactatttttgtgaggttattatggttcaagttgtaagcattaccccaaaacaaactgcctgtcgttgtggtgctgttctgtcatacactgcgcaggatgtcaaagaaaaggtatctactgattacactggcggtcgtgatgtgtatcgtgtgatccggtgtccagtctgtgataaggatgtagtagtatgaaacgcgaagaacgttatgcagtatttaaatatgctgatattgatgccgcgttaagtgatagcgacaaactgcttctctctgcggtagtgaataaaattgatcgctatcgtaaagagcaaggcaaagaacccataaaaggggttgtcgtcgaacatgactggcctgaatacgaacaggtctggaagatgatcgaagaacgtgttgatcgcgaagataacaaccgcaaattcgaaacgatgctggacaacaaagaacgtctgggttatttcttcgtggttgagactcaccaggggaaattcctgatcaccagcaacgcgcacagcactaatcgcttaaccaaatacagcgggtacacataccgcgctatgttcagccctgattgcgggttcgacaacagcgaaatctttactactagctggagcgtctactttaaacgggctattatggtatctttcgatgaaatcgttgcactatacgatccgaacgtatcaatttcgaactataatcttgctgaattcatcgagaacaaactgagcgatgcgaaaaccatttaaaatggttgcataaataataagacgagggtatcatagccctctcttgttacaaataggtattacaatgaagaaaattatctttgctgccagcattttcttatgctctttttctggcaacgcggcgactgatccgttaggagagtttatccaaacactccccgctgtgaagtcaactttaccgctacaacaagcaacagtaatgaagaaagcgccagccaatgcccccagttatgttaaggaattggacgatattacaccaaagcagaaaaaggttttggagtacgctttcaggatcggaaatgagtacgatcgcaaaactgcaaagccagttgaatcggaaacatcgaaacgtttgggatatcatttagcggctattgcctggatcgagtctcgcgcatgtgagaacgtagggaaaggcaaaaagaatcatcatgcttatggttgttttcaagtaacagcccgtagcgcgtccgcacgaatggataaatcatattccaaacgcgtagtaatcaataagctcgaaacccttcggggtggttccaagtacgcacttcacgaactggaatactggcttgattaccacaaaggcgacttgaaaaaggcgctggctagttacaacgcggggttcaagtatggaaagaaagaagcccgtgattatgctcgcatggttaaccataccgcgaagctgttagaagaaaaacgcattatctgataaaaagcccttgcaatttcgcaggggcttttttattatgtgtgtaccgacaattgaggattaaattatgagcacatcacatcgagttattaccagtcacccgactatcatcaagccgaacatgctgcacatcattcagggtgtgctggacgaactgaacaaagatccaaaggttaaagtagacaccatcacggtcgatcgtcatcgcatggaatctttcagcatttacttcgcatatggtgaagaaaaacgcaaactgtttatctgtgaaagtcaagatacgtatcttgatgttggcaacaacacaattcatagcggcggtgtttacttcaacctgaacgtatggggtagcaacaaagagatcatggatatcgtgaaagtgggtattcgtaagcacgtcccgaatgacgttagcatttacgaatgtgttaatgatgcaattgaagatcgctttgtgcgcgtgggggcgtaatggaaactaaactgacaccagaacagcagttagcaattattgatgaacgtattgcagaaatcagggcggtaatgaagccgtatcaggaaaagctgagtaaactgctggatgccaaaaaagagatcaaagaagagattgatcacaaaaccgcttcccgtgtccgtgcgatgactccaaaacaacgtatggagttttacatcaattccccgaatactggacatgaaattttccgtgatgcgactaagttcttccaggatatggggctggctatcgacggatacaacccagaaacaaatcaacatattcttcgtatcgcgatgaacgaagatcgcagtaacctcgaaacagtcctgaaatcgcttcaacgtgtgaaaccatatgtgaagccgattggtggtaaattgctgttcgatatcttcgaacatacatgttcacagttcaacacgtactggttagcctttgacgttgcagaagaacgctggatgtgtttcacgggctggagtctgaaacgcaatcaaaagccggaatttgaaagcgatagtttgcgatcagtgcttgcgtatatctgcgaaacccattattatatccctatcgaagacgattcatactaaggtaaaacgatgaaaaaacttgcgctgttcctcgctctgtttgctggctttgctcatgccgatgaccgactggctgaactctgtaaccatcgcgacatcaaagacgttgcggtatgtgaacaggtaatcgctgaacaattggacgcggcttatgtgtggggtgaagaaaacgcacacctttacaaacgtcaaaagctggttaaacagcgtgagttcttgcagtctgaaccaatgatgaacctttgcaccaatgcgccaaataaggaacgttgtgaaaaactccgtacttacctggttgaagaatataacgctggtataggattatactgatgatgggattagtgatcttttatgggtgtgtgattgctgctgcaatcattatctggtattacgttaaacagccaaacgaaagctcgttccctgtatatgatgacgagttggaagcgtggcaaagatgggacgacgaatttaaatgaacacaggttatatcttaatgtgtgttgtggttgtgatcgcggggctggctgtgctggcttaccgccattatacaggcgatgaaaatgattattaaagaaatcaaagggaacgctgtagagttgttcctgaaacgaaaagtacacctgatccacgggtgtaactgttactgcaacatgggcgcgggtattgctaaagaagtgaagcacaaaatccctggtgcgttcaaaattgatgcattgactatgaaaggcgatcagcggaagttaggcactaactccatctacatgacggaagaaggtcagattgtcttcaatgcctacactcagtttaaattctggggtactggcccacaagtggattatgatgcaatccggtcatgctttgtgagcgccgtagaacgcgccagtgcgtttcctgaaaaattgcctatcattacccctcttatcggtgcggggcttgctgggggcgattggctgcgtattagcgctattattgacgagtgtacgggagattacccgatcattgtcgttcacttcgatccatcgattgatccacgtaaggcggatttatcatgattgatcctatcaaagcaggtcgggcgatcaagaaagcgaacaagcggatcgctgcaatcaaaggacaacgcgccgcactggtgaaaacctgtgaagcgctggcgcagtccatgaaagcgaacaaaataaacatcacacagcgtaaaacggcggttgacattctttgtcttgttgatgaaggactggataaagaaatgggcgaactgaaaagcaaaatcaacatgtggtatcttgatatccataaagcacaagatagcgaaatgggcggttataatcatgactgacaaaatcaaagctaaagcaatgaaggtgattgcgacatacggaacactccgttggtgtaacgcgcaggtgtgcgggtgtatgggttgcgcaaatcatactatgacgaaagaagagtatgatattgcgatccagatgccagaaatcaaagagcatcttgcgcgacgtaacaaaaaactcatgggtaacggatggtttacaattggctaaactgtattatcactatgcatcaatgaacgctggaaagagtgcgcgactgttgacggacgcgcacaattacaaagaacgcggtatgcgtgttgtaatctataagccagcaatcgacacccgcacatcaaacacagtgagttcgcgtatcgggctgaacgaaaagtgtgaattgattgcgcctgatatggatctgttctgggacattcagcgccggaataaaattgcttgcatcttcgttgacgaggcgcaattcctttcgaagaaaaacgttttcgatctatgtcgcgttgttgatgaactcgaaatccctgtaatggcttacggtctgcgtactgatttccagttgaatctgttcgagggttcttactggttgctggcctgggcagacgagatccgagaactgcggggaatgtgtcactgtgggcgtaaagcaactacggttgcacgtatcgacgcacaaggcaacttcgtaaccgaaggggcgcaggttgagatcggagccgaagacaaatacgtttcgctctgtcgcaaacattatcacgaaaaacttattgataatgttggtctgaactgttaaggtgtattcagacaaacaaaggagaacactatgagccgtacttaccgtaagaaatatgttccagtccgtgataagtcctctatcgaacaaatcgaagagacaaaagcattttcacagtattatgcacagcacggagaaagccctgatggtattcgttggtactcaaccaactggaaacacaaatcaggttgcgcatatatccgattcgataaaaacctgaatcgtgacggtaacaaagctcatggtgatatctccgcgatgctttcgatcgcagtcaaaaagattgattcgaaagtacgcgctaaaatgcgtcaggagttacgccggatgaaagctggcgtgattggatgggatgaaaatatcgagaacgcaaataagatccgcgcttttgagcgtagcttatgctggtatgagataacttgatgtatttttagactaattttacataaggggcgattcgccccttttttgctataaatatatacaggaacggatctattgttgatccgtgtgtacgtagagaaatgtttatgaacattaaacgcatatcacaagcgatgatgtttggattgttaatcttgtctcctgcatcacatgctgatcgaaatactgtcgtcccgaaagagttcgactattacatcaatgcagcgctacaggtctatcttgacacaatccctcccagtgtaaataccagtgaattgttctataactatatggaacgaaaatggcagcaaaaacaatgccgcactgaaccagaatgtaaacacctgggctatagggtggcaaacgaatttgctactattcatcgttcgtaagggatgaaagatgcaaacatttaacgaagtaacagatcgtgataactcaagcaaagtagatgcctttatcggtatgtgtctgatgtctgtaacatacatgcatagcgcacactttgcgaccggatcgtattctcaacataaagcgtttgagagtttttacgaagatatgcaggatttggttgataaattcaccgaaattcatattggtatcactggtcgatataaacccgtattaaaaacagaaaatgtgcttgacacggtggtgtatctccgtaaaatagcaaccgaagccgacacaatctatgattcagtagatagttcattgaagaacattctggacgagatcaaaggcttgtgctatcaaacgatttacaagctgacaaaactttcttaaaaagagtttgacacgcgaaaaagtgatgatagaataactatcgaattgaaacataaacccaatggaaataatgatgaacttaaacactatagtaaacaacccaaagaaaaccactctgatcgctctgggcgtaatcgctgcactgtggctggttccgaactcgtacactatcgttcaggatggtacggtaaaaactcaaaccttcatgggtaaagtttcaccgaagcctgttctgcctggcttccacctggtaaacccactggctgatttcgaggtgttcaacaccaaagacatcgcaatgaagtttgacaaattgcaggttccgtcccaggataaattcaaatccactgtggatatgaccgtgatgttgcagttcgatggtaacaaagccccgatcaaccgtatcaacgcgggtaatcaggatcaggcgcttgataagtacgtgaccgaaaaacttctgtcaactgtccgtgagttcggtaaatctgtaccgaaagcacaggatctgtataacgcagaagttcaaagccagctacagatcgcaattcagcaggaagttgaagagtatgcccgtccttacggttacaccgttaaacaggtattcttgcaggacatcgacctgccggaagcgattaagaaacaggttgaaaacacaaaaattcgtgaagaacaggtgaacgcagaaaaagcagaactggcacgtaaagagcaaatcgctcaacaggcagttgttcaggcaattgccgataaagaagcccgtagcaatgctgcacaggctaacgagcgtgatgctgatgcccgtctgtatgcggctaagaaagaagccgaagcgaacgccgtgttgcagcgtaccattacaccagaaatgattcgctggaaagaacttgacgttcagatgaaacgcgcagagaaataccagggcggtgttccacataccgtaatgggtgcgggttacgatggacaagtgattttcgattctcgtaaataaggttttaaagcccccgctctgggggcttgactcctaaaacgagaatactataatgaacataaaacagatcatccttactatcttcatttcgctattcttcggctttattggcggttttcttggtgtattggtgattgcgtctgttttatgattaacctttaaacgtggagcacgttatgaaacaatttgataaagctgtcgtaattggcagattccaacccttccataatggtcatgcagcaatggtgcgtaaagcactcgaagaagcaaaaaccgtttacatccttctgggttcagcatatgcttaccctaacgttttaaaccctctgacagcgcgtgagcgtcaaacaatgatcttctcatggttaaacgctaacttcccgatcgcagatgttatccgtgttcagtttgagcacatcccagattatctttacaacgaagagaaatggaaaacttctgttcgtaccgcgatcagagaaaccaaaggcgacaaaatcgctatctatggttacgaaaaagatgcgggttcatactggcttaaagcgtttggatggacacacgtacctgttgatcctgttcaggttgacggcaaggatctatcagcaaccgatctgcgtccgattatcttcaaccacaaaaacggatgggataagaaactgttacgctttgttcctcaaacaaccgtcgattatatcgacaaatggatgatggaagacacgttctggcgtttattctacgaatacgagaaatgggaaagcgaattggagaaattcaaaaactacccataccccgacgcgctgaactgctgcacgggtgatagtgtggttgtgtgtaataatcacctgctggtaattcgtcgtaagttcgcaccaggtaaagacgcgttagcccttcctggtggacacaaaaacgcaaatgaaacgttcctggattgtgcaatccgcgaactgctcgaagaggtgcggatcaaggttcctgaaaaggttatccgtggttcaatccgtaattcgatgctgttcgatcatccgaaacgttccgtatacttctcaaaaccgactgtggcgcagtacatcaagttagaacctaacaatgatggaagtctgccccgtattatgggcggttctgacgatgcgttagacgcgttctggatgcctatgcacgaagtcaaacaaaatcgtggtgagttcttcgatgaccactatcagattatcgtagcgtttacgggactctgataaaagatgaaaaaagcccttgcgttcgcgtgagggcttttgtattatatacacataccgcatgaataatgaaaaggaagaaaaatgaatacgatcaacgtttctaaagctgatgttatgaaagcaacgattattgctaccgaagccatttcattcatggctaagaaagcaggagttgatggtgctgttatcctgatggagattacaaacaacccagaaggcaacaccgcaaggtatttcaaagatcttacttcctatgcaatggaagaatttaaatgattaaacgtccttactgtctcgtaaaccgtccgatctgtgcgggtggtttacccgtcaactgctggcagttggttgaaacaggtgaagcgttcctgaataaacgcggtgataaagtattcgtctatggtgtggactcgatcgagaatgaaacgatggtgatcaccgacgagaaaacaaaagaaaaatatacgttgacttccgaccacgattgccgtaacttcaacgtgtactggaaatctaatgaagactttgaaggaattaaatcatgaaagtagcaacccttagcggtatatctgatgtaaaatgtcgtatgtcgctggaacccggtaatcgtgtaggaatcaaacacacgggttcagtaggtacgaagaattttactttgcaatctgttgcgcgtgataaaaacgatatggtttatgtgtttgttacagaaccgatgtcaaataatatccgtcaaacactggtgatgaaactgggaaccaaagatcctgcaatgctgatcggtggaactgtagagcctgttactgttgcgagcgtcacacataagggcattgaatgcgccgtagacggcaacggcaaactgtcctatgaagggactaaacgccaacccgtcgatcgtccggttgttgttggagacatcttcacgtcagaacgccgtgaataccatgttgaatacatcgcacaagatggttctctggtttgtcgcatgtactcccgtaagagcgcagacgataacaaatacatgggattaaccgtcattgatggacgtgacgcgatcctgctggattccctgaatgttaaaattaagtttgcatactcatgattcacacaattagcgttattatgggtgatgtcgtaaacatcaacgggcacgattactacgtagcggaaatcaatacaaagggtaatcgtgagatcctggaactggacattgtaaggccgtccgaagggcaatcccttacgatcgaagtggttcataacacgaacacaggggaagacgtagtgaagccagttctggcacgtcttccggtgttctactgtgaaaagtcaaaacgttggaaaatgaaatgatagatttaactgatgtgaaagtgggtgataccctgtttgatcctggtattcgtcgatacagtcatcacaaaaccccacgacctcgcaccttgtatgtgatcaaggttgcccgtcaatacctgtatgcgtcggaagatccaaatatcaccgatattaaagatttccgtgttgagcgacttgatcgaaaaacaggtagcgctaatgactggaataatcatacacagggttatcatagcgaagacgaatacaaagaacatttgtaccgtatcgaacttactgataaaatcaaagacgcgttcggtcgtggacatgtaacgcgtgtaccaaatatcactaccgctgaactgcgcggtatcgcaaaaaccctgggggttgaattttgaaaactgtaatggaaaccgtgttcggttctcacctgtacggactgaacacaccgacaagcgacaaagactataaagggatctttctcccgcacccgcgcgatattctcctggggaaagccccgaagactattgacaccagcacaggcgataaaagctctaaaaacaccgtagacgacgttgaccgtcagttgtatagtctgactaagttcattagtcttgcgtgtgatggtgataccgtagcgctcgatatgcttcacgcttcggatgacaagctgatcgctaactctcaaatctggcagtatatccgcgctaaccgctggcgtttttacaccactgaactaactggcctgttcggttatgttcgtaagcaagccgcgaaatatggtgtgaagggttctcgactggctgcactgcgcgaagttgtcgatgtactgaaagaaaccgaaacgatcggtggtattcaggaattcacaccagatatgaaacgctatacgcgtgaagtgaaagtgtctgacatcaaggatcgtttccctacaaacgagttctgtcgattcgttaccgacacaacaatgaaatctggttgtcaggacttctatgaagtgctggggcgtaaattccagttcacgatcaaagccgatgaaatgcgcaagtcagtgtataaactctgggatgaatacggagaacgcgcacgacaagcagaagccaacaacgggatcgactggaaagcgttaagtcacgcgttgcgtggtggtatgcagttgatccagatttacaaagatggtgatatcgtttatcctctgcctgatagcgcattcctgaaactggttaaagctggcggtgtaccgttcgcaaccgtacaggaaaagctggaagaagtcatgggtgaagtcgaacgccttgcagcgatttcaacatatccgaaagaagttgatcgcgaattctggaacgatttcatcgaacgcgtatacagcgatcatgttgtggggtattacaaatgatgtatcctaaattgtccggcgctgaaattgatgttctgtataaactttacggatacgcaactaaagtgctagacttagatttcaatgacgtacccagcaaatcagggcgtgattccctgattcaaaaaggttacgctcgaagagtaacgggttatcacgataattcgaaagcatggttgctgattaccccactggggattgacgcataccgacacggtattaaaacggagtggtactaatgactgatgttattttgaacgttaaagatgttgtactgggcgataccaaaaacccagacgcagttacactggaacaggctgttgttcagattatgcgcgatagcctccgactggaagttactgaacgcaccgaaagcaattacacgggcgggattgatggtcgccagttgtacgaagatagcaaacacgttaatgtaaccctatgggcggacattgacgaaaactcatacaaaatcgacgagattgattttgacgtatgaaaataattgacctctgcgctggtgtgggcggggttcgattaggatttgataaggcgttcggcggtgtcgaatgccttttaacgtctgaaatcgacaagttcgcacagcaaacatatatcgaaaactggggcgatgataacctacagggtgatctattcgccattgatgaaaacaaagtgccggatcatgatatcctgctggcggggttcccgtgtcaggcgttcagtaaagccggattgaaactgggcttcgatgatgtacgcggtacggtgttctttgaaatcctccgcattatacgcgctaaaaagccccgtgtgttgttctttgagaacgtgcctgaactgctaacccatgacaaggggaagacgttcagaacgatttacgggcttctggaggccgaaggatacaacgtattctatcaacgcctgaacacaaaggatttcggactaccacaaagacgggaacgcgtgtttattgtctgcttcctggatgatgtattcttttcatttcctgttcccccgcgtacacctacacgcgtaggcgacatcctcgaagatgctgatgattcattcaccctctcagataacgcatggaaaggctttagagagcgtaaggaacgaaataaggcaaacggtaagggtttcggttatcaggccgtcacaagcgattctgcgcacactgggacgataacagcgcagtattacaaagacggtgttcaatgtctggtattgcaggacgggaagaaccccagacgattaaccccgcgtgaatgtttccgcttgcaagggttcccagattcatttatcataccggatagtaaaaaacaggcatatcgtcaagcgggaaattcagtttcaatacccgtgattgaagccatagcgaaacaaattaggaaagtattatgagaaatcaaccagaaatcccgatcgataccgttgttgaatggcattacaaccactgggataatgatgaatggtctgccagccagggcgtattgaagtatcataaaggaaacttcatcctgatcgaactcgaaggtaagccaaccgtgctggacggtaaagatttggtaatgcgtccgtacaaagaaagaccggaaacaaaattcttcaaaaaagtgtttgcatccagtagttgatagtggtatcttagctttaacgaaacgaaactgaaaaggaacataccatgacttttaatgacctgtttaacggatgtactggcgctggtgcgaaattcaatctactgaaagattacccgctgggttctaatccaggttacgtgatggttgaagtgcgtaacggtgaatactacaacgtgttcatgtgggatcgttctttctcttactgctggttcggtgcgaaatacaaaccagattacatcctggaacaaatcgaaacagtgaaagcgaaaaaccctgaactgtacgcgttcgcagagtctattcgtggtgtgttcggacactgattaatcaagccccgaaaggggctttttcgtgaggaaattattatgatttacactgttgaatgtttggttgattatgaacctggtaatctgatctgcgcgtctgataccgttatggactgcatcgacgcggtgaacaatcacgaaaccttcccgtatgttgcggataatctgcatttcactgcgtggaaagacggtaagaaagttgcggttgcttctttagtaggaaacagagtaggcgatacaataggcgctaacggctatgaacctaaccctgtgacatacgaagaagtcattggtaaaatggaggcggtatgaaggttaaaaacgccgaacgctgggagaataccaacgaaatgttcttcattcgttgcaaccgtaagcctctcaaatgcgggtatgacgacatagacgaagccctgagcaagtttaacgaaatcatccgttcatccgtctaccgtagcggggaacatcctggcgacctgtgggaactggtagcaaaagatccttacagtaacatcgtcctgaaatccgaaacaaaaggtaaagtatcatgaaaatttatactgttgaaagtttaagcgaagattactatacatttagtgatttggtcggttctaccgtatcgctggaacgtgcgattgaaatggctaaaccttttgactgggtgagtatcactgaatgcgacggctttactggcgaacgtctgcgcatagtaacactgagcaacgaaaaagccattgcgaacgcaaccaaagaaaacttacaatttgaggatgtaaaatgaaaatccgttctggttttgtgagcaacagttcatcaagtagtttcatcgtccggttcccgaaagatccgactaatatcgacaacctgcgcgaaatgatgggcgattgcgtccctgattgtggttactacgatccgccgttgacagcggaagaagtggtcaatcacgttcatcgtgacttaggtggtcatctgggtaatagctttgaatcgttctacgacgataagcgctatgactgggaaaccgaagaaagcgcagaaacccgctaccgttcaaaccctcaaatcgcgcttgcgtatgacgggcgagactggtacgatctggacacagaagagaaagacgctctgatcaaaatgtggttgtacgaagagtacaacacgaagttcggtaatcaggacggcgtgtttatctatgaattcacgtactccgatgaatgcggcccgatcggaactcaactggaacatggaaacatcttccgtaaccttgaacacacatcaaagagtcatcactgatggataataaactgaaaacagaagtttgtgttgttatgcctcgctatgcattaggggagtcgatcccctttagccaggatcgtcccgcaccgtttgatgtattttctttgcgaaaatatcttgaacgatttgaactgaacgagtatactctccaaatcgttcgggtatggaatccggtaatgtatgcgcttgcgtttgacgttgctgaatccaaactcactacgatggatgaatacgttgaactcctggcgcgtaagttcgggtgtgatcgtacagtcgaagcagtaagcaataaagttaacgaaattttagaaaaattcaaatacgagaaaatttaaatgtcaatcacaaatatcgaattcaaaaacgctgtatcgaagccaaccccgacaaaccacgttttcgtgtgtgacgtatccggttcaatgtacaacgaactgcctaagatccgtaaacacctgaaagcaaacctggcgagtctggttaaacaggatgacacagtttcgatcctgtacttctccagcaaaggcgattacggcacggtgttccgtggtgagaaggttagcaatgtctctgacctgtctaacatctgcgcggctatcgaccgttacctgaaacctacgggttgtactggctttgttgagccgttgaatctggctgcggaaatcgctaccgatctgcaatccgaaaacggcaacctgaacagcctgatcttcctgacagacggttatgataactgctggcgtaccgatgatattctgaaagcgtgtgcggttctgccactgactttcaacagtatcgcgttcctggaatacggttattatgtaaaccgtcctctgctggaaaaaatggcagaagcaaccaacgcattgcacaaattcgttgaaggtttcgacgcatacgaaccagcatttaacgaaatcatcaccgcgcagacttccgcacgtatcgaagtcaaagttgctgatgctacccatgcgatctacctggacgaagggcgcgtgtatgtcctgaacgctgcaaacggtgttgtgctggttccagaacacatcaaaaacatctgggcgctgggtgaaaacgcgattaatgatgttgacggattcgatccgaacatcgccagcgaacagcaagttctgtatgtcgtgctttatcatgcactgcacacaatgaaccctgatctggcatggaaagtgcttcaaaagctgggtgatgtccgtctgatcaaagcgtatgacaactgctttaccaaacaggactactccaacgcgaaagacctgattgcacaggctgttgtagatccatcacagcgtttcgttgatggtattgattacaacatggttccagacgaaaacgcgtttactctggttgatgcgctcgaactgctggcacaaactgacacagtgatcgacctgtcttctgagcactgggcgtataaccgcacaggccgtcagactgtacagaaagaagatgatacactggatcaactgaccgaacagatcgcaaacgctgcaaccccagaagaacgtaaagcactggcggcgcaaatggtagcgcatgaagtctggacaccgaaatttacccaaaccacaaccaaagtatcggttaaacatctggtgggtaacagttcccgtccgaacatttccatcaacacggatctggaagggtatgtgactatcccagaaagcaaacagaaagaattcggtctgccggaaaaagtcgaaactaagcaggtgcgtaacttcaccatcgttaaagatggtatcgtgaacgttaaagttctgccactggaaaccgatattccgacactgaaaaaccttcgtgcttctggcctgactatcaagccgctggaaaaaatcggtgatgatcgtatgtcggttctggtagactttacctctctgcctctggttaaccgtggcatgactcgcgggttaagcggtaaagagttcgtgactgataacgtgcgtctggaaatcctgaaaggccgtcagaaggttatgaagttcttccgtgacaacgcgatcggactgcgcaacgcagaagggctgaaacagcgctttggtgaagctgcgggtgaatggctgtctgaacagggtattcgtgattacgggttctctccgaaggttgagcgcacagaatcgactgatgtttacatgtcgaaagaactgaacgtgaaaatcaagggtgtttcctcccttcctgctgtagcggctaccgtcgcgaagcgtgaagaaggtaagaagaaactgaacaacggcgacctgattatcctgtgggcttacgatcaggtgaaatctgaactggatgcgcttgacaaagatcaggtagtcgagtatcttgataagcagacaaaggcaacgattcaggaagtccgtaaactgaatgcccgtttaagtcgcgtaatgtacggtgttgtagtagcccatgcatggttcgcggatctggacttcgaagaaaccaaagtttctatcgctgcaaaagatattcttccgaaagaagataatattccatccgatttctggaaagtctgggaaaccacatcattcgaatgtgaaatcgtcctggaagaaaaagaagtcaaaatctaacaatgaccgcccccgaaagggggcatattgaggaaaataatatgtcacgtaacgtattctggggtgaagttgtaaaaggcgatatcctgtacctgtccgaaccacaagcctatcgtgaaaacaacgaaaagaaccacgcatacgcgcctatgctgccagatttcgtggttgtcgatgatgtctttgtcggtgaaaatggctggcagatcgatttagtcggattcccatacaaaaagggtgcaatccttctcgaacttgaagatcatcatttcttcgcccatgttggcaatatcgaagatcatggtgatttcgatatcgaagatatccgcgaaaagccgtatgtgttcagcaactactacaaggtcggtggacacctgcgcagtgataacaaaactgttctgtatctggatggtattctgtctgggatgcataatttcagcattgagaagccaggaaacagcgcagaactctaccgcttgtttggaaagtacgatcgccagaatggtaaactgttaccgtcagaaatggcttatatcatcaatcgtctgatcatgggacttcacaaaacattcctgattcactatgatggtgatgtagaacaggcgatgactactgtgattgacatcctgaaagcaaaatctcgtgaaatggataccctgccaaaatgacattattcttcatcattgcgttaggtgtgtttattctgggcgctacgattacattcatggcgttcgataaacgcgaatatcaactggctatcatcgggcttatagtagcttgtatcccgctggtgttgtcatacaacctgtatcatgagaaaatcgcagataacgcgaaatacgaggcaaggcgatgaagatccgttctgggttcgtgagcaatagctcaagcagtagtttcattatcgggataggacttgtccgccctggtaaagaacaggaagttgcaaagatttacggtgagtcaaacgttgaatcgctgatggatatgatcaccgaaattcatcatcgtccgcgctggggtgttcctcaagtacatgatgacggtacaatcacactggaagcgttcggatgtaatagcgtcgaaataacccgcatctgggacaagctgaaagaactgaatctggatgatgttaaaatcgttcacttcaatgagtgcggcgacgaaccggaatacgacgaggaaaccggaagttataactatgactggtatgacgacgcggacgcattcgggccggaactcgaaaagaaatacaatctcctgagagataaccgcgaactgttcattgaaggtgatgttcgttgcggtggtggttatgacggctaaacgattggtgatctgttatcgctgtttgcatgtgtatgatcacaacacagcgaagcgaacagcaacaaagcgcttgcgcgttaaagaggcggaatgtcctctctgtaaatgtaaaatctgtttggggtaatccatgataacgatagtatactgggaagaattggaaagcgaattcagtgatgaagctggggaaatggctgctgtagcgggtgaatctgaaatgcttacagctaccgaaagcatggatgatgcatttaatcgcatcaagaaacaccagaaagaaaacgaaggtcgggatattcagtacatgctatcgttctggctggatggtgaaatcttctgtcatgctgctattgctgaggatactccggtcgatatgtgtcgtgaagaaatcgtgaagtacgtcaaatcttttatgcattaattaaatgagaattgaaaaatggcttatgtatctaaaaaaattgaaataatttcgtcgatgatgggtaaaactctggaagagatcgaccggattgggaagaactttaaagatgaagttttccgtttgcctgaacgtgaaataaatttaatcccgtatttcaacacggttaaaattctgatcgatcctagttttggtctaacggcaactcattacattgtcggtaatgctccatatatgttcgtgttcagaaaatctaagttgattgcgtatttcgatcgcgcgaatcttggacatattcgggcaatcatcgaccggatcgaccgttatgaagtagggaattacacggaacaaaccagacgcactacatacggaaagattacgagtatgctggaacaaaccaaacaattcgacggagccaacatcgaattgattgatgatctgctaaaaagggtcaacaagttcaaagaagcgtttgacgtaaagaaaaccgcgcttgctgaaccagaaacggtgaaagcgccaaccctggcatctttcgaagaaccagaaaccattccagtaaacacagcgttgaaatacatcatcgaaatcgaaccaacagatcttgatgcaacatgtaaagcattgaattctatagggattaatttcactctctataataaattcagttaacccaaaaagcccttgcgttcgcgtgagggctttgttatattacacatatcgaaacggaacagccaaaaggaacgagaacatgaaagctaaaatgatgaagttcgtaaaagactggagaaaaggcgcgacaatcggtgagagctacgtaatcgtagacatcgaaagcaacctgctcgaaggtgcgaacgttttagaagttcctcgttacggtatggttgaagccgctgataaagcaaaagaactgaacggttacgttctccacatcatcgaagcaatcgagaaggaattagcatgaacagcgtttatctgattgaagaaaccattatccagccaaacggcggagtgtatgaaaagaatatcgtgtgtgctgccctgaatgaacaagaggcagatcacaaagtgaaatatttaaatgaaaatgctgttgtatgtcagacgtattccggttatagtgttgcatatgcttggaaagcggttagtttagaaacccaaccatcttggttaatcaacctgaaaaaataaggggcttatcatgaaaatgaattacgttcgcggcggtatcatggcactgttactgaaaggtgtttctcgtagtgagaatcgtatgggtatggggccgatgggtaaagtctggtctgtctatattggcggtgactgtatcggttacatcggcaatgatggattgagccgcgtttacctggctatctcaagcgggggtcgtgaagtcgaatgtggtaatttcatgcaagcacttgcgcagttcattgatactgcgatcactcagattgaaaaacagggctgcatcgaacgccgttacgcaaacaagatcggaatgattgaatattccaacttctgcttcgaagtcgaagaagtgcgttacgacactatggacgaagtatacgaatatgtgcttcgtggtgaggaagtgattaagtcctataacgggacgaaggttatcaataaccgctctttcatcaccccgttcgaattgcgatatcaacagctaatgggctggatcgtgatggaataagaaaagcccctttcggggcttttttgttatgaggatgatagctggagtttgattctttctacttcttccggttcatcaatgatgctgtagtaaatcgtcacggtgattgcgttttcgtcatactgcggaatcacttcaacatccagattgtaaacacggggttcgtatgcgcggatcgcggagacaatcgaagtccttactgcttccgctgttagcgggttcatgttctcgaaaatctgttccccgatctcacaaccaaagttgctatcgaaaggccgtgtgcctttttgtgttgttacgataccgatcagactattctttaccgctgccgcccctttcgaggcggctacgtcattgttccagtcttttgttaagttgggatcgatatcgctatacagtaagcgaaggttaacacccattttatccaaccacctttagaaacgcctctaagcctctcagtgcaacgatatgctcgtagccacacgaacaccttaccggaatgtttgcaacgattgctggcttatccagagcgctatttattgatttaaagaccggatagtcgatactatccagaacggcttctttctctgactctttacagtcatcccataagatttgttcaccgtcgatgactacaaacttaatcagttcgggtaactcttcctttccggtgcggtgtggttcgactgaaatcttgatctcattgccgtacagcttttcttcgtattcatccaccatgatatgatgacgattgagcacaaacttaatcagttccccgcattcagggcatttgatttggagatctacagtctctttgttgatactgtcgaacagagccataatgtaaacataatcgcgctgatgcttgaacacatcaccttcaataatgaagttatccgtgtcatcaagatcgccaatggttaacgggcgataagtcacattatattttgggatatgtcggggtgtatgtttacgcatttgcattctcttttcgtttcaagtcttccgccagcagtgcaacgtaaattgaacgttccatcgggcttccattcattataggttcaatctgtacggtattcttatttaacaaatagttggttttgaagaactcattcagttctgatttgttgaacaggattttgtacagtgtcaataagtcgctgaactcaatatcacgcacggtaacatgacaggacttgcgtaacagtttaacgatattttccatatcttcaatagacaccagatccaggatcgcgttctttgtatcctcgtctaatgcattccattcgtatctttcgccgtcctgcttgacatactggacacattcaaggaataattgttcactgttgttacgatgtttcgggaatttgaatcccagagtaagcgagtcatcaagggcatattcattctgcaaaacgtaatcagttacatgcatgaatgcttctgattgtccgctgcttcctttgattcggatctttattgcgttcttaccgaacgatacacaatacaccttagtgaaaatgttttcctgttcggtgcgggaataacccggatacagaatatctaaaatttcatccagcatttcttgctgttctgtgagcgtcttcccttccatgtccgcgcttgtgagtaagaaactcaactgatcgcgcacggtaaacatagggaatcgcttcactccaccagggagttttacgcggattatatcaatcattttaacctcaaaaggggctttcgccccttattgtcctgtaaccacaccacgaacggcaattgctgcaccttcgataagtgattgtttgaatccgtcccaaccttctttatctgcttcaacaagccagcctgttttataagcaaagtcaacagtgaatgtccagatttcgttattgctttcataactcagttctgggttgctgactttaacaggcaaacacttctggaatacatacgtgctgtgcgggacaccatcgcgattgtgtaagtttacctggatcgcgcttgatacttcatcaatgaatgcgaactggcctgagacatcatcacgaatagctgataaccattcgttgaatactttcaggttacgcgcttctgaatccacacggaacgttagcgataattcaccattctccggtcgggtgaatcggatctggggtacaccgccattatacacgtattcataacccagtgttttaccaggcaactgaacaccaacgatgctcaaccccatattatacatcattttgtcacggaattctgttagcatctgtccgtaaacactatcaccaaacagggaagtaattaaacgagggcttaacgcccccatgattttactgaaacctgttttgttcagggacataatagctttatcaaccgtatagctgaatagcttgcttacgccccctgtaatagcgttcatgaactcgttcgggttattcgcgttaatggaactcatactaccatctattaaagtatcgcggatactcccgatcgtgctgtcgagaatgcgtgatgctggactggttgcgaatacaacactaaacaggttgcttcgctgaaagtctctatttgccattcctgacaaaaattcatctacgctatagaacattgttcccccttaatactgcgtatcaaaaatcgaatcctgacgcatatcgatcagttccataaactgaatttcgatttcaactgcgatcggggtgttcggtgattctctcaacgtatttacaatgttgtccattgtacgcccgaaacgaacgctggtaatacctgctggcccaaatgtagaatgagggaaccgtaaactgtcgcccgtctggaaatcacgtataaaccatacaggaggtgatttaataacttcaatgttagttacaaaatcaaccatctgatcgcttataatcgaaccattagacacagtaggtgtaggaccatttcccgcaactgcattattaataagttttgccccggctgttgatgatgtattaattgtttgtttagctaattctgctatttcggcggcagttcctcctgatgtcgtaccataacccagcaccgtgaatagataatagattttgataagttctagcagatcataacgactttctataacgaaagtattgtaatacatctttgtgcgcttatcagagccttgaaacgctgctttcgtaccaacatcaactgcttctctacggtctgccaaaataccaccactagcagactcaatagcgccccagataacgtttgataccgcacgggataagcctttagcaacaatactatcggttgcatcttggtaacggtggctgttaacctcgttatcgttcaggcttcgcggtaaaagtatttgacaaatagggttgagcgtaccaatagtacggttattcaaaacttgtttatatcgaacgtttcctgtattcgcgcttaggatctgttgtgcgttctgtgctgcttgacgtagtgaacggtagttatctttactgcctggtgcaaatccaccagtgaattcatatgcagtgaacagcaagccgttattatacaggcttgatgcattataagcgttatcaatacctgctgcacgttgggaaggaaattccgctgttacgatcggttgagtcaacgcgtttttagttgttgcagcacccccagaggggatgccagcatttttgatttctgcaaatgattgtacagtgtcttgcaatactgtaattttcatttaaatttcctttaagctaatgcaatcaatggtttacggtcagttcgttgtactgaatgctgaaccgtgttgtttactgttttgttgttgacctgaacactgttaggcgttgtaggctgaacaggggctttcactgcttccggttgcttgtcaatacttgcactcgtttccggtactgcggtgatcttttcctgccagcgggagatcatatcacgatagcggtctttgtcgtcctcattcagcttgttcgaattatttttctcttcaagcgattctatgagtttttccattacctttttatcgttgcccgtcagattgtctttgttcaggatttcatcgccctgatcgaattcattatccgctttaggtttcgctttctcttgcgcggcttcgatctgtttggtttcgtccacgcgcttacggttagcggcattctctttatcaacctcagcctgtaacagtttggggttttcctgcaatgctttcagttctttcttcttctcttcggtgatcttttcttcaatagccacacgatcgcgcatctgttccaattgcttagatagcgctttctgtgcgtccgtctgttgcccgaaaccatatgagaatgtaccttgagtagccttaacctgttcgacaaccttagaacgtgcctcaaccactttatcattctgatcctggatctcctgctgtttcagcagaatcaggtcatcgggatcaatttcaagaccgtatttttgtttgtcgcgcagtgctgatactttcattccgcgtccggcgttggtaatcgtttcagatccggtatattcacccagagcgtaaatcagattaccgataccttccgtgattgcggttttaatggtattacccagaatcttaaatggttctactaacagagcttttaatttttctgctaatgttgcatctttatcacctaatttatctaatccgtcatctatactttttgccaacgcctttatattgttgaaatatgatccaaaaagttgtttggatgcttctccatcattaagcaaatcattaaaccatgaagcgatgactttacctaaaacttcaatagcaaacacgatactaccgataatcagagtccattttgcaaacttcgccagcgcttcgagagaataaccgataaagcgagccagaagaccggatgtattatccttgattgcacccagcaaagacaatattttcttgctgaatttcttctcttctttatccttatcgcggatcttcttattgtcccgatcgacctccggttcctcttccggtactggttcaggttccggcgcgggggctggtttcttttcagcgagttcgataaacttggtgattgcttctgcaatcgttccggtgtatgtttcgattttcgcaaatgggttatgctggttcgatacactgacggagttatcaacactggttgtgctgttgtctgttaatgatggtggacgcgatggtccaacaaaatctggcaactgttcagcaagtggttgctgatcctgttcgtattgttcctggaagccagcgaatttctctttgaaacgttcctcaaaggatttcacactgtctttgatgtccagtgtattcagcgcggtttcaagggtgttatcattgatatcctttaactcgcgcatcgaatctttatctaacgttgcctggatcttacgaacagtcggttgcgcctgtggttttggtggattctgcatccggcgacgttgttcttcgttaaaatatggattgctagccattatcattcaccgatgatgttaagccctttaatggttttcccctcatgcacaatatagacttcctggagtacgccacgttttacatcgtcatattcataacgatacaggcagttaattaattgaatacggttttcgtccgtcagttcgatcggcttcccgttgtcatacgcttctttaagcagtaatgccagatcatccagcattagggtcggtttgttgaagaccaatcgaaggttatcaaaagtatgttcatacttagcttcgctgattttcatatcatccagattaataccgatctctttcaatacagccattgctttatcgtcattatgataatgcaggtgaatcaaaaggaattcggtttctgctgcggttaattcgcgcggttgaatctctttgatgatatactcaagcaactgcattgggtctttcattgctttaatctgggtgaaatgacgataacccagacgggggatcgtaacctgttcaccagtaggcaacgtgactactttatttttgctgttcttgatgtttaaacgcgtaaccataaatttatcaagtgtgtttttcttctctttcatgatcgcctcaagtatcccgatatttactatttagtaaatagaatataaagggaggatgtctaatgtccagtaaagttataaaccgcatcgtgtcggttaaattatatccaacatatgaaaagttcgctgataacgtctatcttgaattgttacctgcccttgtctcaatgagcgagaagaccatcatcaacggtacttctgaaacgttgatgcagatctacgataaccagttaatttatcagttgacagagaaaccgattatccaggtgtcgttccagtataaccagacgttagaacagcattactacggtgttctgtattcaaacgtcgaaaccgatgatatgaaccgctctatactgcgcctaaacctttctccggtgcatacggtgtttcgtcgtaagttttcccgttcgttcagtaacaacgccgtacagacgattacagagtgcatgacggcactgtataacgatatgaagttgatcacgccgcatatcgacgcatcaaacgtgcgtattcctccggcttgcctgagcgggacgtatgaaaccgtgtttgattacatccgtgacaacgggcagagcgtagattcgtctgacttctgttatctgtgggaagatggttccggtatctttatgaaaagcaatacggagatcctcgcacaaaccccgataaaggcttacaagttcaacgttagtaacccgtttttaggtgacactttggtattcactaaagcggaatacattacgcataaggataacactaccctgttagtggatgcaagtttctttagtttctcaatgacggataaaaagctgtatagtgatatcctggcgagtaccgatattgaaaacgcatggatcaccatgaaccggaacgcggtatatgagaacaacttccagaacccagacaaacaggggcaaccgttccaggcagtgaagtgtcaactgttatccagctatgagaaaaggattaagtttgatatcaatcagggtcgaatggatgttaaagtgggggcattgattgaggtgttaggggatgaatattcagggaagtatctgatcgttgaatgtgtccgcgacgtatcaaaagatttccacctgcaaacattggaatgtgtacaggtggcagcggctactaacgacaccagcaaaacaagtgaggcttaggccgtagtttcttcatgatagcccatgaacaggtcgaacacgttgttcttgttctgtttacgggctttcttgatattctcgtagttctcgcgaggcatatcaatcatgaagcacttctgacgcgctgtagcgttctctgtgagcgcaaacagttcatcttcggtgtaatccttgtttttgtccagatcgagaatgacgcattgccaggtgtcttcatcactggtttgctgcatcatcaccagtgcggcgtttttgaatcccagattatgcgcaagcatttcatggacgaattcacgatcctgatcttcataacggatttcttgtccttcccaacggataaggcgcacagtcttacttggttcatttttcataacgtggttttcctgctcataagttcgcgtaaacgtttcgtcggttcaggtgggtttttgatgatctcttgaatctgatcccacacttccggtgaaacttctttcctgtccatgataacaatattcgggttatcacagcattttccaaccataacacaacgcccacaattaaggcatattgtatccggtatcgttggagcgttatcaaggaagcgaccgaaatcaatatctttcagcgcttccgcaacccgtgcttcaacttctattgggtcatattctttatttttcatgctaacaattgactcccctcataattggtaggaacccgacaggcaaaaaacaattgttggtgttcccagtttttacgcgcctgttctggagtatcaccccatgcagcatcaaacccagttttcgcacagcaccagcgaagattcgggtcttcgctgatagtttcgaatatttcgagtttcttactcatttcaggtcaccgataatttccatcgctgcttcgatgttttcaacaccataaaaggtattcccacttacttcaaggagtttgataccaggaagataaaccccaaccagcgcaccgatagcatcgtggatagcgtagttgccgttttgaagttgatttgcagtgtgcataactttcatgatgtttctcctttcgtttcgatgtaggtaatgtaccattacattacccagaacacaagcattatttttcgatttcgtagcactcttcaacttcgatgtttaccagaggtacttcgatatcccatgaatccgcttgtgcatcgtatacggctttgtcttcgtcgttcagaggcagacaagtaacccaaccgtcagtaacgcgcatcacgcgcattttagaaaggctttcgagtgcgtccgctggcagtttttcaccaccgttacccagttgtgccaaacggtcttcatttaccagaacgattactttgccttcgagttctttagtgatttgcatgggatgttccttttgtctgtttcgtttcgatgtgtgtaatatacaaaaagcccctcacatatgcaaggggcttctttagcaaaaagtgctatttaaaacagatcagcgaagataacgtgaatgtcatccggttcggtcttatcgcgtcgaatcttcttgatgattggcaggaagaaactgaactcaggttcgcccttcttacgcgttttcgatttctggagtccgtcaacttccatttcgacgatagcgccgatatagtcatctttgttcgccataatgtattcgcgatccagttcaccacgttcttctaacgggatgtacacgcggttaataccgtcttcatcgtatcggtaatccgtatcagtcagaccggaacctgtgtttgttctggcttctcctgataagtcctcaaccacgaacccgccaaccttatgaggttctttggtgtgttcgtacacgtcaatgattcgcagttcgatcggtgttttgttcttcaacttcacctgatccgcaacgcgtgaatccttccatttgaaatcaacgtttttcaggattgaaccctctttaccgtcattgcggtaattgttgtaatcctttttcgcttccgcgtagttctgcaccaggatagaagggatcaacttaaccgatgttacaccagagccagccagcgcaccttccaggatagagaaacgatcgcaatatggttgaacactcggagcatcgccatagtatacttcatacggtacgatatcccagacaacataaacgatattgcgctgttcttcgtcgctgatagtacctttcagggatttgtttacaatcccgttgccctcttcgcgtttcgcttccgcttgtgtctcgttctcggtagcttcccgcctaacatctgccacaaggtcagaaacagaatcgtcgtcatcgcccataaacccagcaagactaaatggaacgctgtttgaaggaacgacagcagttttttcagcagggacataaatcagttctccatcaagtacaacatcataacccagatattcacgaatctttttcagatccttgtccagattcaccaaaccttcatactcattccccgcgcgggttgctttgcggatctggttctctaacagatcggacatacaacgcgcaccatcggctttaagctgcgagtaagcagggaagcgaatacgttttaaggctttctcgctaaacggcgtagcgaggcactgaggctgttctggaatgagtttcttccatacgcggttcggtaacgttgtacccgcaccacattccagatcgcggttaatgatacggcgaagaacttcgcgatcattctcgttcactgatgatacgatatccagcaaacgatcacgggctgcgttgcccgtatattttcgcgttgccaaatcagacatcaaatccgcgatagcattcgatagcggggttgtgcctggcttaccgtccacctgcgggaacttcttaatgtgaaacataatctgtttcgtgtacgtaatgcggaaaatctctttcagcagatcattacctgcattacgtttcaggatcgcttccttctctgaaattttcagagtcgaagcgagttcatttagaatctgtaagatcatgtaatttctcttcgatttcaaaccatgatttaactgactggtgaggcgaccacggggtttcacgttcaccacgcaacatatggaataacggcaactgactgatgacgttatggcattcgtttaagtttaccgcaagatcatcaacgaagcaaaccagacgattgccatatttggctttcgcttccaggtagcggtgtactttggtttcaccatgcccgacaaccatcacttctttgaatgcagaagggaacagcgtgttcaggtttgcaatacggttaaggcttgctgtaggagtggttcccagcgccgtgacagccacgaaatcatatttggctttcagacggttgataacaattaacgcatcgtcatacgcgcttagatagcgaataaacgaactgttattgtattcttccatgagaattttcgccagttggtgatcgcacccgaagatttcggtcatatcacggaatttttcatctgtaaccatatccagcgcgatatcggtcggcatgttgtgtttagacaaaaagaacgggaggccgctttgccattttacggcgatcccgtcaatgtcggtaagaataactggtttcaagatttaacctcataagaatcaaaaaagaataaacgtttgtttgcttcgattacttcaagaaaacggtctttctcgaattcgcggtgagattcgaaggtcgcgcataaaaaatcacccctgcggtgttgatatgtctcaacctcaacaatattctgattcagatcacgcgcccattcgaatacgtcactgtgaatatacgcagattcaaaatatactgagtatttcatcatttatccttgtacatataaacagcgtcgaagccaggaacatccagttcgactttatcgaaaacgatatctctcagcttacatttttcaacatagctgttgatcacgttaatgttgtttgcgccgatggtaacgtaatacacacccgctttgtagataacacccataatcagggtagaactcaaagcgccctgcgcgtggagtaatgccagcgggttaatcgcgcctttgaacaggaacgcgcattctactctttcatcataatctttcataataactctcagtcgaaaaatattgcgaatatgaaccatataccgaagaaaggccagaataacacaatcagcgggaaaatggtatgttttaaaagcaaagtttttggtgtgtgatatccgttatggcttacaccaaagcaccaggaaaaacgtgcggcgcagtatacaccaacaacgaggtatagaatgataccgacgataatcaaggctatcataacagatctctcaatcgggttaaatttcggacaaactcacgttcagtgagcaccgtttcattcatcttattctttcccattgaatgagtcaaggtactttttccggttgcagccagcgcacggcggaacccgtcattcaggaaaagagcattgtacgcgttttcaatcaggatttgatacgcttcggattcacggtgaatcggcatacccttccagtatagggtctgatcgcgataccatttctttttcttgcctttgaacttggcggctttaccaaccagcgtacacacatgcgcttgcatatctggattgctgaatttcagactttgtaaaaagccctccattgatgcacattctaccccgtcaaacgtaaacggatgtggagcgaagttgctcaatgcgcatgatggatactgactacctgatccgatatccattatcgaataacctcatacactttattatttttgtcgatcaacttagcacccagcttacgaaggaaataatcagtaagtcccttgctttcgctttcaaagtgagcactgatgtaatcaaatccgccaccgtcatcggtagaaacggaaacatttttgattttctgtttgtgtgtttcgatcatttcaaaaacactactggatatataaccatgaggaaatcggatgtaataacccataatcaccccgcgaagttaacgagtaatgcagaaaccatacaacccagagcaaaaccaaaagcaatcaaagccagttcactattctgtttcattttcagcttccttcttcccttcctggcgagcgcgtttgcgtccagcacgtaccagagaatcatagtacggacgtttgcgatcgatgttgtcagtgcggtatgctttaccgtaatgactcgttttgaatccgtaatacttcacgctttaacctcgtaaggcttatggagtccacgcgccggatcataacggtcatatgttgtcccgttggttgatgccatgatagagacattctggcgacggttccagttcaacagagcaagaacgatacgatctgccgcttcaataaaatactttttcattagaaacctaccttccatactttttcgaatttgtcgaatattgcaccgatacttttcagatacgcggttgcgtcgtcttcagaatttgtgtacatcgcgaaggagtatcccccgaattcacgacacactgatagcggtttaatgctggtaatgttttggttatatacccgcatcttatcgatcattgcttcggtaatttgatgctcatgatattcgagaatatatttcatttgattgtatacccgtatttgttggtttctgcattcaatgcaatagccagcttattcagatccccgatatcaccctcaaggtctaaatcaatgctgtcaaccttcgcatcattataaagatcagtacccgcgtatgcatcaatttctacgattttcgcgttgtgttctcgaatgagattcattgatgcttctgggatacgacgcatttcgaactgaaacgttcttacttcaataccttcacgcatcacgctctctccagacgggttgttacttcacggttatagatccgcgcatactggcgaatgtcttcgttatcgctggtgttcttcgcgatatatgcatcatcttcggtttcgaatgatgcggggttgcgatcgtcgttcgacaggtacagtttaccgaagatatctttctttacagtctgtaccccaacaaacatcacaaaatctttttctatgttaatggaactcatgcttatttcccgaaaaggtggcggtcttgggggtttgcatcccattctttttcccagctactacgctcgcgatctttatagacaacctgaaccgatgcgtttttgagttcttcgatctctttgtcgcggcgacgtaacgcggtgatcagttcgacaatgaggtgttttgcatagcgatcttcgctgttactcatgaaccccattactttctgttctaattctttggtactcatgttaagccctcaaaccaaagctacgttttttgatgacggtgacattatgaacacctctgttattgcaagtgctggttttcagagtttcggctttacgcgcacccagaaacagagttttaacaggagtcacaggagcagcgataactacaacagcagcccaacgagcgccaacagctttatcagtacccaggtcgattacagcagaggtatttttaccagcagccagaacatacgcacgggcttcacgacgagtgttgaagcaaaccagttctttcatgttgtaagttttcataatgtcatcctcaaagttaagttgtcttgcctacgtggttaaagatacaagaaagtcggattcagtgcaagcattattttgcataaaaacgaaaaaagccgctacctttcggcaacggcttgatttttaatacttttcttcgggctggaacaccgcacgacacgcccacatagaggcttctttcagtcggtctttcgccttttggatttgatggatacgttcaagcatcgcatcgagttcttctgtagtgaatgaatcggtatctgataccgcgtaatcacttgaatactcttcatccagttctttgaagatttcgcccagggcaacttctgcggccttgatgcggtttactttgtcgatcttttctttcgagtggggcttatagccctgtacgtcttcaatcgccattatatactctctgtaaaggttcgggcgataacgtcgcgctgttgttcaggagtcagtgaattgaaacgcactgcatagccggacacacggatcgttaactgcgggtatttttctggatgcttcacagcatcttccagagtttcgcggcgcaacacgtttacgtttaaatgttgtccaccttccactttaacagtgggttgaaattcaatatcgacttcacgttttgcgaatggagcaacgcgagctttaccgatcactgaatccatttcgagggttttggataccaacacacgaacatcattaccttcttccaggtagattgtaccagtgtgtaaaccttctaaaatctgatatgctttcattgtattacctttctacgacataataacgtaacgggttgatatggaacgccagcattgcacgatccagcccgttagggtcagttacttcctgtttcagtttccacccgcaatacacgcgtaagcagaactgaacctttccgactttaagccacggcttgaagacataaagcccccatgccgaatcattccacatcaacagataaccgtgacgcgaaggatcggaaccaccttctgttttcgggttgcccttccaggcgaagtctgattgtgcttcacgccctaagacgtgataagcgaagttgtacgccttgttacgccacaaccagcctacacgttgcgcatacacacccagatcgcctaagtgataccggatgttagcccaacgccggatatgtccaccatcaccatcgatcgggttatcgaatgtttccatccaacggaaccctttaggtaagtgtccggtttcttcactgtagaacggaaccacaaaaggagccagcagaatagccagaacaccagaaagaatatcaaggggaaccagtacaaaccagcttgcgtattttaaaaagcgcatgtgcttctccagaaaaaaggctatccgaagatagcctgttgattaacgaactgctttgatgtacttatgggcttctgcaaactcttccataagagcttcatttgtgaacggaatatcgttcgatttgaaaccgccgctgataagatactggatgataaacacagcagaatcaacagatatcaactggtgatttgttggttcgatgtcagtacggcgaaccacgtttacgatcgaccagtcgaagaatcgacgatggcattgtttcttgctgttcacctgtggtgatgcaaagaacccgttcacggaatacgcttctaacgcgtgacggaacagagtttcaaaatcatcaatttcttcggtgaaaaacttcatcaatgcattattgatttcatcgccagaagtagtgatttcgcgaatttttggggttaactcaaacagcttttggagacctttcatatttttctcttttaaatttgtgggctggaagtttctttacttcaccccgcattccggggaacctattaccggataccaacagagcctatcgcatacgataaggttgcatattccgaaccatttaacggcattgcgctacgcacccgaattggagcaggtgaagggactcgaaccctcaacaatctggatggaaaccagatattctaccaattgaactacacctgcgtatttggtggcccctgctggattcgaaccaacaaccgcgcgattatgagtcacccgctctaaccaattaagctaaagggccggaatttttagaactgtttgcgatagatttcgcgaaccagcggatcaacatctttcgcgtacttacatacgtcttcgaactggacgatgtacgccatgacttcatcggcacgggatttaagtttaccctgatgcgcatcaatgatcattgctgtcattacgtcaatacgcgctggggcttccagaatttcgcctttgtcgaacagctttttggatttgctgacggtatcagcgataattgcttgaatagatttagccatttttagatctcgtagattgcctggattgctttgtaatgtgcggaaacgtattttgtttccttctcttttgcttctttttcggaaatgtaacccgcaaccagatcagggtcaggaacattcgccatgtgagcgcttggcagtgggatatatttacccaggattcgttctgccgcttctgctggaacgtctacgcctacagaaacaactttaccataaaaaggttgttccccgtgctggcgtacaccaaccacgataccagattcagatttgatttcggaaccctgcggacgcgcagtagcttcgatgatcacatattcgccggatgcttttactttcagttcagacatttctttactcattgttgttaaacactaatctggaaaagttaacatgaggttctaactcttcccgtttaatttgttccacgatacagccatatttctgtaagcgtgaaatccattcatcattaccacgatcgtatttatcgaggtaatacaccgctttgatagcgcctattgcagcataccattcgatatgttttgcgcagtttggacacggcgaagcggttgtgtacaattctgcgttgttaagcatgataccattagtatgcgcacttagcaacgctttcatttcagcgtggatctcgttatcgtttgaccatgctgaatgctcaggacggtgaaccgatttcagtttaccttcgtcattcagcatatgctcgttatgatcagcacaacggcaatcagaatcaaccgtattattcgaaccctgcgaaaccacacgcccgttcattactataaccgcaccaacacgggtcgatatgcatcgagaagcctggctgtgttgaatagcacggatcatgtgaagtagtttcatcggtcatccatatatttcagaatgtctttgatgaaatcgttatcagggttaacgatgtgatacgtagtacctgaacgtgtcactacttcaacaaacgatttgttcgccggaatcgcgtattcaacaaccggacttgttgcaatgtcctgttgaggatcgttatcaaccaacccaaacacacaaccataacgaagcatcgttggttcagtacataaccatgcctgatgaatctttctgattttgtcgctcataatactcccgcccatgttacgaatttagttaccggattccactgaatcccgaactgctgttcaacgatgttacgttgactcaaaatacccagaaggaaggagaactgaccatcgcggacaatcttcactgtataaccagcaggaattttatcagcaatgcgctggcctaactggttgagtttcagttgaagttcaacaggattctcaactttaacacgattacccagttcaaccatcacattttcattttcacgaataaccataatattctcctttgtttgtgcgggtatcttatcacacccgcactcactgtcaactgttttttagaagtcgccgtaatcaacctggaaacatgggataccgttcattcgccacatcccgactggtgtatccctgtcgtccactgcaagaacaggataatacttatcgagaatcttttcaacaagtatttgctcttttacgtgaatatcgtgacgatgatcaccttcttcgcgcatgtagataccatcgctcaggtcaacaccatacccaatcaggcttgcagcggtatcatgtgcgcactgtacagtaccctcacgcccagacacaacaacacaggcatagccagcggccttatacatcctgaacagttcttgaacaggagggttaggcggatcgttgatcaccttcgtaaagtcatacgggctacgttgtccgactttggttaatgtcccgtcaacgtcgaagataacacatttcggtttgcttggatctgcatagctcatagccggaacccagccacggagtttacggtactgttcgaacatcgcccagacacgggaaacaggtagagcattcacaccgcgtttatggttgcgtttcaggagttctacgatatcggcatcaatccattcgatatggaaatcagcattgaactctttcgcgatctctcgccaaccatcatgatctttttggtgcaaatgggtgttgtgaacgataacattcttcccgcttgccagtgcattacgaactgtatcttcttgcactcggcaaacaaacagttctttctcttcggtgaagcggtagccagtgagatcaccgccagcacaataaagggttttgcggatatcgtcgcgggaaacagtcaaagtgtttcccagttgacgtgctttttctttcgcccatgtagttttcccgctacctggtacgcctacagtaataaacagattcatttcacaatctcatattcaatcagttctttgttatgctcattcgttagattgagccacatatcacggttccagtcattttcgatccagagaccttctttgtccttcttcgcatcataaacctttccttcggttatgtcacggaaaaatgacttgattattttgacttgcatttctcagggtatcccacggtacacagaatgttatccgtctggtctttctgacgcttaacgtcattcatccagctacggaagattaacgaatcgggatatgaaagggcaacgtatgggtttccgtcataaggcatgacaaggtattttttaccgtcaatctctcggacttctgcaaccactttccatttcacattcaccggattcaccttagcggggagtgtaggcaaaatcttttctgggggcttctccgcacacccaaccaacagaacgcccagaacaagggctaacgttgcaattttcatttgtcgtactccgccatatactcttcgaaggacttattgatcttgatttcgatcagtcctggtttcttgaacagcaggtctttacgtccggcatccttgaccaactgctgatccttcgctttctgttcgacatagatcaccgtattggtgttgtttgtctctttgacttttttgatatcagcctgcaactctttgatatctttagccaattgatcattttcactctttagcgtgattgtcatgtacaaaagccctgccaaagacagggctacaatgacaggccacaccaaagaagttaactttggaaaggctggtaatgtcatttatattcttccggtataaactgttcgtagttcttcgccattaatgcaacgatgttatcgaccagcttttgcttatcggtatcatcgaaataacgcatcataggcccgaagataatacgaccgtcaggggttaagtcagcgctcagggcgatcgcgtagtctttgcgtgatttgcctttcgtgtcttcgattgcctgaaatgcttttgcagtcagacgattcagactatcaaggaataacgtttcgaatgcgtcaattttcttgagtgcgtacatatcatcgaggaacatttgtttcaggtcatcgacggtattttcaacaatatttaagaacagatctttgttattgttgatgctatccttcgtgcggtgaaggtttacataccagttggttttcgctttcacaaaacctttatcagttttgatcacgtaaccctcgaaaccttctttcgtgtaggcttcggtaatgaacgcatccagatcggtgatttcgattttctcgcgctcaaccaggaacggacgtaatacaccatctgcgaagatatcctgataatcgacatattcgcccgtgtcgttattacggatgttcaggatcaccactgctggttcctgatagccaattacaatacggtttgtcggtgcgacgtattccatgttgactgtgaaaccatcgttaaccagttcggtcaggcgatcgaacaatgcgcggttagtctggatcacgctcatagcgtccatagcctgttcagattgaacggatgctttagacttaacacccagatagccggaatcgcagaaggtagagatcagggaaccatcttccttaatcatcacatccactacggtttcaccaatcgtcacaggagaggctttcagtgcttcccatgcctttacctcggcatagttgaaaaacttctccatagggcgactgacgagttttacgggggtttccccatccatcgcaaacatgataccgcgacattccagcgcaccaggttttaaccagtcggaatagctcgccatgcgatagttaaagatgcgaacaccggtttgcatcacagttttttgatcaatgaagtagaagcattcgctttcgttacacagcgtcattagctggttgaatagggttttctgatttttggttagctttgtcatagtgctgtttgttccattcaggattgatttttcggatcatgtttatttcaaaatcatgatatgtgtcttcatcgtgtgttgtcacgataagatttacacgcttactttttttgattgccatttccagacgtgcggttttcaaaatattactggggtttgcttcccgccagtatttcgaattgcggtatgtgtctaaccgcttccacaaatcacgacattttccaacatacactatccgaccgtcgatttcaataaaatacacacaatgccggaattcgccacatttaacgaaactccggtctatcctcttgtctgaacccagacgcaaaggaaatattacaccaaatgttacatcgtccattatatatccaacttattcacctttccggtcaacacattgacgcagtgagcaatataatcaccgtggcacggtagaggtttgcatgtacatcctaaccgcttcccgtccaatgctttcagttcgtcgattgtgatcacgccagttcgaatcaagttttggaaatacgggatgaagttcatgatgttttcagcccgtgttcccttgtagaagggattaccgaatttcgtacctctctgaatatcgacatcccaactacctttatacttgtttacgacgcgacaatcaagcgtatttttgtcgccattttgcataggcttcgtcgctgatctcggtgttgaggttgccaaccaggtaagaactcacttctacttcttgtggggctacctgtacgttgtcagacttcaaccatttgttcatccacggatacgggttcggcgttggtttaaatggagactgcaagccaaccgcgcgcatacgctgatctgtcaggtgttcgatataggcaatcgtacttttcagggatacgccgtctacatcaccgatagagaacaggtgttcagcccattctttttcctgttcgtacacttccaggaaaatctttgtcgcttcttcttcgtactggtaagcgatttccgccatttctgggtcatctttacccatctgccagagtcggatcttgctttgagtgcctttctggtgaagtgcttcatcacgggcaatcagacgcatgatcttcgcgttaccttccatcttgccttgttcggcaaagttgaacgtgaaggtaaacgacacgtagaagcggatcgcttccagagcattgacagcgtgcatacacagatacagagcaaccttgcatttacgcatttgctctttgcgtttcttttcgtactctgcgatcgattcgtctgggtatccgtgggacgttaacatttcgattttgagcacaatgtttttcagttcatgacattctgcgatcagatcatcgtagtattttgtcatggaagccgaacgtttcatgatcgcttcgttgcgcagaattttatcgaactctttcgacgggtcgatgtgtaggttgcgctgaatgtgcgtataactgcggctatggattgtttcactgaacgcccatgtttcgatccacgtttccatcgagacatcggaagcgatagggaggaaagccaggttagggccgcgcccctgaatggtatccaacagggtttgatattgcaggttcgaatcgaaaatgattttttcgtgttccggcattttcgcgtactgcatacggtcgatcgacagatccacttcttccggtcgccagaagaatgacagttgtttttcagtcagggtttcgaatacacggtgtttctgttcttcgtatcgtgctacgcccgtatcctcaccaaagaacataggctgttctaagtgtttgtgatctgggtttgtgttcattacagttaacatggatttaccttataaaaagcccccgaaggggcattgaatcaaattttgcaaccttcgcaatcttccgcttcttcctcacctgcaccgtcacgggtgttgtggtagtacagcgttttgatgccgaaatagtttgcatacagcagatcttcaaggatgatttcagatttcactttaccatctgggaagttagccggatcatagtttgtgtttgcagagatagcctgatcaacaaacttctgcataaccgctacgtgcgacagataacctttgtttccacgttttgccattgtccagagataatcatagaagtcaatctgattattttggtttggtactacctgattgaatgaaccttctttcgaagatttcacactcacagggccgcgcggaggttcaatcccgttggttgagttacttacctgcgagctactttcacaaggcattaaagcagaaagcgttgagttacgcaagccatgttttttgatttcaccgcgtaaccattcccaatcgcagttatacacaggtgatgccagttcatcaacgtttttgcagtaccagtcaataggcaacagcccttgtgcatatttcgtttcgtggaacagtccacatgcaccgcgttcctgtgcgagttccatagaggcaaccagcaggttaaattgaaacgcttccatcaactcatgaacgtttccggcgtatgcttcggagtagtcgcaatagttgcttgccagccaggatgcatagttggtgatacccacacccagagaacgacgctgtttggctttcagagccgctgcaacagggtagttctggtaatcaagcaagttatccagtgcgcgtactgcgatgcgtgtaagggctgggaattcgcttatatcggcattatcgagaacgatcgccataagcgtacacagtccaatttcgccagccagtttatcatcgtcatccagtggtgaagttgggatcgcgatttcacagcacaggttcgacatacgaacaggaacagagaaactaccctgctggtttacgtgatgactgttgaaaatgtagttgcgtccggtctgtgcgcgttcctgaacaagcaactggaacagatctaccgctttgatgcgtttcttgcgtaccgttgggtctttttccagactggtatacagttcttcaaactcagtctgatccgcttgatagaacgcgtcatacaggcgatcgttcgcaacgtcagggctgaacagagtgatgtaatcgttattgattaagcgcttatacatcaaatcgttaagctgtacgccataatccaggtgacgaatacggttttcttcaacgccacggttatttttcagaaccagcaggttttcaacttcaagatgccagatcggataatacagggttgcagcaccaccacgaacaccaccctgggaacaggatttaaccgccgtctgaatgtgtttccagaacgggataacgcctgtatgcactgcttcaccaccacggatttttgaacccatagcgcgaatgtgtccggcgttgacaccaatacccgcacgttgagagatatacttcacgatcgcggacgtaacagcgttcagagaacccagagaatcacccgattcgattacaacacaactggagaactgacgcgtaggagtacgcacacccgccataataggcgtaggcaatgacagtttacgatccgaaatcgcgttatagaagtcaacaacatgactgattttatcagcgtgtttttcgtcctgatgcagacacatcgcgatcagcatgaatgcatactgtggtgtttcgtagatgtcgccggacgtgcgatcctgcaacagatatttcccgatcaactgctgaacgccagcatacgaaaattcaaaatctttatcgtgattgattttcgattccagataatcaatctccgctggagtccattttgtcaggatttctttatcgtattttccagcctcaaccagcttagtgatgtgttcgtagaacggaatcgggtcaaactgcccgtaaactgttttacgaagggcgaacatttcgaggttagccgctacatactgccagtcaggttcttttgcggagattcgatccgctgcatacttgatcgctacagcctggatctgtttggtagtcataccatcacgaagcaggtcaacgacactttcaaggaatgcgttaacatcaatatttcttccaatactcgcccaattaaggactttgaacagtttttctttttcgaacgtttgacttacgccagaagacttcactactgttttaatatcactcattatcttaccttgttaagaaaggggctttcgccccctttgtttatactgccatagctgcttttagcgagccgtggtgattatagtctttcaaatggatggagtcaaagaattcttgatccaaatcaagtaagctatttaccttcggcatataaagggtcggaagtggaagcggtgcgcgttccggcttcaacaactctttcgcttgttctactgcgtttttgtagatatggacatcaccgccagtccaaaccagatcgcccacttcatacccgcaaatatcagcgataatatgcgtcaggagagcgtaggaggcgatattgaacggcaaccctaagaagacatcaactgaacgctgataccattgtagagacagtttaccgttgattacgacgaactggaagaaacagtgacacggacgcaaagccatatcatccagatccatcgggttccaggcagaaacgatgatcccgcgatcgtctggtgtggttttcagttgttcgatgatttttgcaatctggtcaacaccataaaaagaaccttcctcaccgaacgagcgccattgatgcccgtagatcggtccaagataaccatgcgtataacccagcgctttagcctgattttcgtagttatcgtcccagatcgtccgcttatcgctatcttcaccccacgtcattttacgcagtgtttccacgttggtagaaccttcgaggaaccattgtaattcatgcttacacggtttgaagaatagctgtttgctggtagtagctgggaaaccttctgcgaggttccaacgtgcttgcatcccgaagatgcgcagtgtaccaacaccagtacgatcggttgatgcagtaccgtgtgttagaacggtgttgacgatatcaagatattgtttcattttatgcctttttcgtatgtcgatcgacgataatttttctgacgcgttcgtttgactcgatctgctgaattttgaaatcagtcagttcatatttcagaaccgcttcacagaattcaggaaccgtgaatgaaacatcacgtttaaaagctggcgcattgaaagtgtgatgtccgtaaatgtgcgtcacaaccacttcatcaaccagtgtattattgattgcttccagaagcaaccccttaccgccaatgagacacacatcacgatctggatgcgttgctttcatcacgtcgattgcagcagacaacccgccgccgtggatgacgtaatcagcaacatcgccttttttggttttgaggaaactaccagaaccagacagaacgcagtgaattcgtcctggcaatttaccaggaagagaagtaaaagtgttcgcacccatgatcaggacgctatctgcggtttctgctttgaagttctgtaaatcctctttgcagtgtccccacggtaaaccctgttcataaccgaaagcatagtccatttcgtacatatcatgaccaacggcgaaaactgcttttactttgctcatagcgcgatccacattttgttgtcttcaatagtcacgatgtagcccatagcttcaaccatgacacgcaatttgtctttacaggcttcattgtacccgcgaatcttttcaaattcaacagaaaagatactcaaaccgttaacatgcgcgttgatgattttggattccagatcgaacaccatcacatctaacggactccattcaaccgaatgcagtttttcgcgggttaacagggttgtgtgttttggtagtttcattggggtacagtttgccatagccattgttccattttacgtaaatcttcctctaacggagtgaacccaaaggattcttcgatcacaccgtcttcccatacatcaatttccagaatttccgttaccggagggtttgacatcacatgatcacgacatgcagccatagcggtcataatggaatttgttactgtcagggtattgccctgaaccgatacctgaataatcatactcacctcataaaaaaagggaactgcttttcaacagttcccattatagcataatcagttagtgtttcaagcgccaaagagcgattgcttcatcaactgcttttttaatttcttccggcgtgtctttgcgtccggctttaaccagggcagagagcatagaacgaatggttgcattcatctgtgacttctcacgatccatctgtgcctgatgcgccttatcaaccgctggggcttctttcttcgctgcctgtggtttcgtaggctgtgcgcctaactcgtccttagcttgcgtttcagtgcgtttctgttcggcttctttcttcacatgaggtgctgagaatttaccagccttgaagttatcacgcataccttccaggatcttacgggctgtgtaccagtcagcaacaccacgaagttgtttcagggtatcaaccagcaaaccgatacttgcgcctttgctatcctcgtcaatgtcgatatctttcaaccattcaacatgtttctgaccggagtgcatgaaatcaaagctgctgaaactccagaaacctttacggttgctgatctcgcgtttgaagtggaaagtcaaacccgcgccgttatcaaactcaccgtagttactgcggaatgttgcccccgcctgtttcagtgcgttgaaatagtcatctttattgatgcggttaacggtgcgttttggtttctcttccggcgctggcgctgctgcttgctgtgcggtacgtttaacaaaagatgctgaacgatgccccgctgcaaactctgcgttcatccggtcgattaccgctgcgatgccgcttgcgtctggtttcactttctgcatttctttgaaagtgtcgatgatcatatccagacatgcaccgtcttcatcttccagcatagtacctttcagacgttcagcaggtttgaatttgttcaccgttgggtcaacaacatactggaacacatacgcgcctttacgcatgaatacgtgacggtagaagtgaactttatagtgtccaacatcaacaataacatcgttaccgctaaccttcgcacccaggatacgggcaaaggatgtcatgtagtccgcgcgtttgaacttgagatccttcttagtcgggctaaagatggattccagtttcttagtagggaacaggctttccggcgtgattttgtctgggttcttgccccattggtaatcacggcttgccattttgtgtttcttcgtaccaaccagaaccagagtattaactgatacgctacccagtgcggacgcgtccggcgctgctaaaccttgaccgttcggcggttgacaagagaaagagaagtcaaagaacgcatcaccagaggtgaaacgatatgtcgcgtgaacagtatgaccgcgaacttcgctgattgactgagtataggttgttggttgtccggtgaatttcgtgaagtattccgcgaactcttgcgcgttgaatttcgtgctgaaatagtttttcgcaaccacgaaatacgctgcaaatttttcttcccatgcttttttgtttgctgcgtgttctgcgcgaacatcactgtaagttttaccagcgctgtttgttttggttacaacgtcatacgcctggttgattttctgcatgagttcagtgctaccaccacggtcggggtgattgcgcagagaagcacgtttaaagagctttgacagttcagctttagattcgtcgccagtagcgcccaaaatcttcaatgcttcgctgtgtgacatttgttcgttaatcattttccgttcctcaaaataaaagcccatgtaactcagtacacgggcaactttaaggtatttatgttttgctgtcaatagattttttcgaggaaccacaccgaagatttattattcttgatgcgtgtcaattcaatggggttatctttgaatgcttcctcaacatctgccattgtaactacatgtttttcttccaatagttcattatggagataaaacctctccacttcgggagaggttttcaaatcaaattcacgttctaacatgttattaccatatctttgattgttggttttgtgaaccgtccagccttagacatgatgatgtggcggtcgaagtcctgcggatcaagatcctgatgactaattacaataacgttaccctcaatatcatcaagcaatgcccgaactgcaaatccgccgtctttgtccattgcaccatcaaatatttcatccagtaccagaagcgataaatcaacacccgatactttgctggttacatcacgccaggtcataagcaacgctaggttaatccttgcgcgttcgccttgactgaatgacgcataactgaaatcatcgcgccccagtgatttgatcgattcgttgaactcgtcatctaaagtgaactgataatcagcacccaacagatccagataatatgctatctgtttgttgaagtacggaatataacgcttaacgatgctcgctttaacgccggaatctttcaacatatccgtaacaataccacgaatatatttttccttgacgtagccttgtcgtttttcgttcagttctgcttcctgctgttgcaactgcttcacgggttcttcatcaatgactacttccgcgcttgcctgttccatgatcgcctgtgcgcgtttagcgttggcaacttcgttttgcagagtacctttcagggcttcatatttggttttcagggcattgagtgcgcgttgctgttgtagcaagtcattcatgatcccttgtaactcgtcctgtttggttttgatcagggttaaacgctgtgtacccgctttgatgttctctgcgatctccgccatacgctcaggagtgggtttaatcgcttgcttacatgccggacactcaccgcctttctgatacatcacctccagctttttaaactgttctacagtcattgagagccgcgaataaccatcacgaagtttgttgatatcttccgtccggtcttctccagtgatcaccgattccgcaatctccgcttgcaactgcataagctgtgctttgatgttctttgcggtttctacgtggctatcgtagatctctttgtatcgggcgttgttctggtttgctttcgctcgctgttcgtcaatgaagcgctggtgtgttgcgatctgctgctggatgtgattaccctgcattgagagtgtatccaactgctgattaacaccgcgaatgtatgacttgtttaacttgtccatttcactgatgacggacagagacagcaaatcttcaaccagtttccggcgttctggggttttcagttccatgaatggggtgtaacccgctgtacccagaacgataacctgtttgaagcccacaaggttgatgttcagcatagattcaagctgtgcctgataatcacctgctgcggagtcttccggcaacttctcgccgttcttccagatctcgaataccttcggcttttgtccgcgcaccactttgtacgagtctttgccgtattcgatttccagttcaaccaggcatttctttttgttgacgctgttcaccaactgcccgactttcagatcgcggaatgatttaccaaacagggcataggttaacgcctcgatcagtgtcgatttaccgccaccgtttttccccgtgatcagggttttctttgccgtatcaaattccagttcgatcggggtattcccgaccgacagaatattttgatacttaatttttttgaagtttagtttcatttaaaatccgttcacataattcagtgatcaattgaacaaccgatgaatcaatagtatatgatagcgtatcgtcgtccagtgtatcaagcatgaagattgaccatgttcgtgatgaatgccatgcacccttcatgatggtcaaacaaactgcgctgggttcccctgcttcgtcagaagtggcaatgatatgtttcattcccagcatacgcaacaggtgagaatatcgggggttcgccccgaaatattcatcataacggctatgcacttgacacctccgcgtatagttcgctaatcagcttattcacttcctctttttcatcgtcggtgatctgcatgttggcgatatactcagtgataaggccacgaacggttttgatttcaaagtcggtatcgacatccgaatcagtttgaactttgtctatgatgttgatttcataggcaatttcttcaatttttgtttggaactttgcaagcccctgatcaatttcactgacaatcagacgtaccgcacagttacggaactgttcaagatcaacatctttctgtgctggatacatgatccggcgatggtgacacacagggttagcgatgaaagtcaattcaggcttgcccgtgaacacatagaaaccgcgtgtttcgtcttcgtcgttagcgctcatagtcagaggcgtaccgatgtaaaacacgttgtcaccttcgttagcgtggtgatagtgtccagagtaaacgcgatcgtacttcttcaagaaatcaggttccagcccatgatcggctttgctgttcttgtagaaatagtaaccagacagttcgaagtgtcccaaacaaaagttagctttcgattgtttgatgtagtcaaaaatacgctggctgttttcctgacaaatccacgggatcaggtcaatcgaatttccgccacctaaatcaaccgtggtcggttcgtcgatgacattaaagcattcgtattgacttagtatctcgcgtggcgcgttggggcgtattttgtccttaaattggcaatcgtggttgccgacaagaacatccagagtgatccccgcctcaatcagaagaggaaccagcttttcacgaacaaaattcattgtcgtttgtgtggttgcttttcgaacgtcgaagaagtcgccagcatggaagccgcgcgtgatcccgtgttctttgcaatactctacgatctgtttgaataccgcatacaggttttcttcgttccatgggttatcctggcgaagtccggcatgggtatccccaattaaaacatagttcatataaacctcaaaacccccgaaggggtttatttgccgtatttttcagaagccatgatgaacaggtctttcaactgttggttcgaagtgatccacatcgtttcaatcagttcatcgttgtatggttgcttgagcatatcacgcatctttttgatcgcgtatacgtactgctctttgttaccttcgaagagtgcgttctctgcgtgtttatgcagtcgcttccattccgctttgttcttccgcatgaacttttgcgctttgcgtagggcttcctgttcaatgcgtgtacccttgatggagtccagttcttcttcacgaagatccagcgctgatttttggtgtacttcgtcgattacttcatgctgcacgttcatagtaagtgatctccatgatcattgtttcggcgtttattacatagtccagacgaccttctgttatctggaagtctggatctcgtacatctgtagggtcgatgataatcggaatccctaagctctgcaactctaatttcacaaggtaaggaagcagatcaatttcgtcgttagcatctgctaaaattttgttcaggtcaattttaattttcatagaaacatttccaatgttggcgattcgtccacaacctcgattttatcttttggttttttcgcggactcttcatactgattaagtttgtcatggatatcctgaatgaaagtttcatcggctatcgtggtcatatcagtatcatcgctgtcatagacatgttccaggaagtatttgtatttcttcgcgttctctttcttctcgtagagaatacgagttacaaacgcttgccagcaagccttgttgatgtaaccgtagacgtttgtatatttggtttcgtcaaagttatgaaggccggaaatcgttgctgaaattccatcatcgatcatatccattttccagtcttcggaataacggttgaagttgtatcgacgtgccaaaccgtgagcaatattcataatcgcaataccgagttcatccggcatcttacgatcaccagtttcacggatttgctgtttccacttacacataactggatacagcttatcattatctgcataaatctttgtagtcattatattctccaaattgaatacattcattatagccgattgaatcaggtgtttcaaacctacttccaatctatattatttaataaaatcagcgcgaagcgcttccgtgagcgaagcgaaacggatagttaaaactggttaaaaagtatacggaaatgtactgttttctctatatataaaatataaaaatattaaaacgtacattcagtacatagacactcactacgttcgtgtccttcgcttcgctcagatttttgaaatgatctattgactttgaaaaagtgatcactataatcagtttcattcaacaacaacgaggtattgaaatgtcttcatttgcaagtatgttcaacctgaacagcttaatgagcaatgacgatgatcctgttgatgtgatgtgtatagatatttcaaacctttcggtagcaacgttgatgaacaacttcaagccgaaagaccagaatgacatcaaccaacaaattgttcgtcacatagtgcttgacaccattcgtcacaatgtggttaaattcaaaggtgagtaccctgaaattgttctagcctttgatgataacaagtattggcgcagaagtaaagcctggtactacaaaaagaaacgaaaaatggaacaagaagcatcggattgggactgggatcgcctgaatggtttccttcacccgacatacgatgaaatccgtgctaatttaccgtacaaaggtatccgtgttgacttcgcagaagccgatgacgtgatcggtgtggtgacgcgtaaagcggtatccgaaggtaaacgtgtcctgatcgtttctgctgatggtgactttgcagcccttcaaaaatatcagggtgtgcgtcagtggtcgccaacccaaaagaaatgggttacgccgaaatatggttcacctcgtaacgatttgcgcatgaagatcataaagggcgataaaaaagatagtatcgcttgcattaaaatgcgaaatgactatattgttacgaaggttgaaggagaacgcgccccacaaatcagggctgctgaactcgaagcctggctggaagcggacgatccgactgtgggtatgcccgaagagtgggcgatccgctacagagaaaacgaagaacttcgcgactttgattttattccgaaagatgttgcaacggcaatcgaagaagcgtataatgctccaaaaatcgggaacaaagcaaaaatggagaaatacttcatggaatgcaaactcacccgtatgtatgaaaaactaagtgacttttgaggtaacaaaatgagtgtagaattactgcaagaaaacccagacatcgctaaagcggttaaagaactgatcaaagaagcgtcgaacgtgaaaactcagatcgaacatttccagggttctttcaaagacatcaaatccaaagcgaaaacggattatggtatcgacggtaaaaccttcggcaagctgttcaaactgtatcacgaacaggcacgtaccgcgttcgaagaacagaacaacgaacttatcgaactgtacgatgtgatcgataaggcgtaatatgagcgaaatcggaaacaaaaccgaagtcggcttgtatatcgaaaatctggttgcctctgagggggcaacctacatggaagctacgttacaatggatggacgaaaacagcattgattatgctatgctgtccaaaacagtaccgaaagcgatcatcgacaagattagcgacgaagccattaaaaacaatctgctgcgtccttctgtggctaaagaccacgcgacgacgcaaacactggatgatttcatgtgaaatttaaaaccccgtttgacagttcagacgctaattcccgtttgaaaccgatcgcggtatacaaactgtatctggtgatgaaaaatcactttgctgggaagtatgacgcgatcaagtacaaatgggaaataaagatcactgaacaagcgttccaaaagagaaaggatagatattttttcgcaaagttagccgaaaggtttacattcaaagaaatatatcttatactactctgcaatatggtagctaaccccgacttctgggtcggggatgtagacgaagatacgatcgtgttttatcgtcaatacataggcaagttgaggcgaattgataatattttcgtggacgatgtaaaaaacctgtatgaattttcccgcatgaaaggtattcccctctcaacggtgtttcagtatagcgtcaaatcatcaacctcgtatatcagcaaactcgtacagtctggggtgatttcttatgaatcattcttgatcctcgactcgtttttagacatcataaataaacacgatgaaatcgcaacggatttcgtctggaatgaatttagtaaaaaactaaacgcatacagaaaattagttgaaatcagtaacgaagaaatcgtaaaataccgaaacttaatgaaacaaactttaattaacttaaacgagaaataacatatgtcattctttaaacgtcaagatccaaccaaactgcaagaacaagtcgccgctctgaaaggttcctccggcttccagaaagatgaaaaagagtggaaactcactctggatgcacagaaaaacggttctgcgactattcgcttcctgcctaaccgctctgatgacgaactggcgtttgttcgcctggtgaatcactcgttcaaaaagaacaatcagtggttcattgaaaactgtccgtctacccacggcgattatgatggttgtcctgtatgtcagtatatctctgacaacgatctgttcgaaaaagccaaagccaataaaggcggcgaagctgataaactgctgggtatgattgggcgtaaacaatccttctgggctaacattctggtcgttaaagatccgaaagcgccggaaaacgaaggtaaagtgtttaagttccgtttcggcaagaaaatcatggataagatcaccgctgctatcgctggcaaccctgatctggatgaaccaggtatcgctgtaacttgtccgtttggtggtgctaacttcaccctgaccgcgaagaaagtaggcgactggcctaactacgacgacagcaaatttggtgttcctggcccaatcaaaggcatcgaagacgaagcgcgtcagaaagaaatcttcgaaggtatgagcgatctgcgtccaatcactgctccagaccagttcaaaccaactgcggaactgaccgcgaagttcaccaaagtattcggtggtgctgcaatgggtgctggcgcaagcgctggtgcggatctggattcagaactgaactcatttgacaacgaactgaaaaacttcgataatggcaaccagtccaaaggtgctaaagaatctggtggcgtaagtcaactgaacgtaggcggaagcgtaccggaagatgacaacacccctccgtttgacctggaaggtggttccggtgatgacgacctggataaactgctggatctgtaatgcttacgggggcgaaagcccccaatttgaaagtttgaggtagatatgaatttagaacaaaacgtatatgtagcgcatctgaacaacgttcgcaaatcctgggtaggtaaagtgccggaaaacatcaaagagattttccgtgcgatgcctcaagctgaacgctttgagcattacaaacggatcgacgaagcagtaagcgcagtacataccggactgattcacgacgctcgcgaagcgggtacgaaaatcaacgagtccaaaagcaaagaattccttgacaatgcggcggatcgcgttgtagaatccctgattaacggcacttttgcctaattgaaaactataggttgaatatgaaattctctaaacaaacgatcgacatcctgaaaaacttctcccagatcaacccgtctgtaatgctgaaaaagggttcgttcattatgacgaaatccatcaacagcgtagtttacgcagaagcaacaatttctgacgtaattgacgaagatgtaggtatctacgatctgaactcattcctgaacatgctgaacgttgtaggcactgatgccgaagtaactcacgacctgtccactggcgaaatcgtcattcgtggtgagaaaatgaaaatcgttgagcgttcaagcgatccaaccacaatcgtacagcctaagaagcgtctggaaatgccagttgcggatctgattttccagattagcgcgaacgatttcgaaaaactgatcaaagcgtcacgcatgatgaaactgaccgacctgtctgttgagccaatcaacggcaagctggtaatcaccgcgaaaagtaaagaaagccagtcaaccttctctgtagaagtgggcgattacgaaggtgataacatgttcaacttcgatatgaagattgacaacatgcagttcatcaacagcgattacaaagttgaaatctcttctcgcggcgctgcgaaattctcgtccgaaaacggcgttgcgtatgtagtggtacttgaagcaaccagccagttcaagtaagataaacaaagtagtacacaaggggcgttaagcccctttttgataatcaattgaaggtaatattatggaacttagtgaaaacgtacagttaatcgaaaccaaatacggcaaaatctcccagtctcccgaagaattcgcatgggatcagcgctatcgcccgacgacgatcgatgaatgcattctccctgctgctgataaagcgacgatgcgcggcttcatcaagtctggacgcatcgacaacatgactctggtttctgattccccaggtacgggtaaaacaacgctggcgctggttctggctaacgaagttgatgcggaagtgatgtttgtcaacggttccgattgtggtgtgaacttcatccgtaacgaactggatcgttacgcgtcctctatgacgcagaagaaaggcggtaaaatcattctgattgatgaattcgatcgccctggcatggcagaagcacagaagcacatgcgtagctttatcgaagcgtacagcaagaacgttactgttatcatcaccgcgaacaacatcaacgggattcaccctgcgctgatctcccgttgtccggtagtcaagttcggttccccgtcgaaggaagaacgcgttgaactgatgaagcaaatgatcaaacgctgtttcggtatcctcgaaatcgaaaaaatcgaatatgaccagcaggtgatcgccggattcgttaagaagcactacccagacgcgcgatccatcgttaaagctcttgggttctattctaagcgtggcaaaattgatgctggtattctgtctgagattgttggttcggacatcacaccagtgattgaggggcttaaagcgaagaacttcaaagcactgcgagccgaagcaatcaagtacgcgcctgagtatgaaactttcctggctaaacttctggatgcggtatacccgatcgtcaccaacgaatctaaggttgcactcattcaggcagtaggcgaaaacaacgcacagtacgggctggcagtgaacaaagagattcacctgcaatacctgttcatgggcttaatgcttaccctcgcgtgggaggcttaaaaatgtcactggctgcttttctcgatgaagaagaactgaacgaacatgaagcggcctggcgttctaaagactgggacaagatcgaagaacttgtgaaagagtacaccaaagacaaggaaaacaccttgtttatggtgctcgaagaactgaacaacgggaagacaccattacggatctctgcccttgattcatacgataagtttttcatcgacaatgcaatgagccagcatatcgaaacgctgatacctgcatacacgatgaatatgatcggttccggtttaccagaccaggcgcactttgattattacctgcatacggtgcgcaaaggtaagcggttcggggcgtgggctaaactcaccgaagataacgaaatgaaagttatccttcatgttctccaaaaacgatacggtgtaaatacacgtatagcaatggaatattacgaagaactcaaacagcttgaaaaactggacgagtggaagcggaaaaatatgaaagttgctttatctgtgttggctgatgttgtgaaaaataaaaccgaccagaaaaaggttgaacaactaataaagaaatggtgatgtatgaacatgctcgaaattaaactgtccagcgatgacagtttcctgaaaattcgcgaaacgctgacccgtatcgggatcgcaaataacaaaaagaaaatgctgtggcagtcttgccacatcctacagaaacaagggcgttattttatcgtacacttcaaagaactgttgaagctggacggtcgccaggttgacatgaccgaagatgacgaactgcgccgcaataacattgcgcgacttctggaagagtggggtatggtttccatccttacgccggatctgaaattctccgaagagaacaacttccgcgtattgactcacgcacaaaaagctgaatggactttgaaatacaagtaccggatcggacattaatcaaaagcccttgcagaaatgcaggggctttgttatattggttgtacaccacttgtgaggactaaattatgaaaattcgtattgaagaaatccttaactctctcaaaaaagaagaccacttgattacccgtctgcaccgcgacgaaatcgatctgtctctgacctgcaatctctcggatctgcgcacgtacaattacgcgcagaactacttccctaatttctatacccgtatcatgaatgaatatacaatgctggtaaatcagttgaattcgcttgagggacacgaaaaacttcgtgaatctgcacagcgttcacttgatctgatcaagctggctggggtatcattcctgtcacgattaaacacggagaaagaaaaccgtaatgaatgaattttatctatccgttgagcaaatgggcgatcacatctacgagcgcttcattgactctgagggacgcgaacaggttcgcaaaacaaaatatgcgcctacaatgtttcaacacgctatggcgggtgtagactcgccatatcgcgacatttacggcaagacctgcatcaaaaagaactttgaaagcatcaaagaagcaaaaaactggatgcagcgaatgaaagatgtaggcatggaagcgctaggcatggatgatttcaggctggcgtatatctccgattcctacagaaaggaaatcgaatacgatcgcgacaagatccgcattgcttcacttgatatcgaagttaccgcgcctgaattccctgatccacgcgaagcaaaatacgctatcgacgcaatcacccactatgacagcgttgaagataaattctttgtgtacgatctggtcgagggtggtttagatgaatgggtagcgtcgaaagttgataccgaaaacgagatcagcgaagaagatttgaagaaaattgtttaccgttcattccagaccgaaaagtcgctgatgtcggcttatatcaaagactggaaagagcggacgcctgttattgttacgggctggaactcaaacaagttcgatatcgcgtatatcatcacccgttacctgaacatcttcgggcaaaacgttgttcgtcatttcagcccgttcgggaaagtgactgcgaagacaacaaccgaccattacgggaacgaacaactgggctatgagatttacggcgttgctcaaatggatggaatggatctctacaagaaattcagtttcaccccgcaaccaacttacgctctgggcgcgatcgctgagttcgaaacaggtaaaagcaaagttgattacgaaggttcactgtctgaactgcgtcaagcggatcaccagaaatacatcacgtataacatcgttgacgttatccgcgtgttggatatcgacggtaaacgcaactttatcgaactggttctgtctgtagcatactacgcgaaaatcaacttccctggggttatgtcaccgcttaaaacgtgggacgcaatcatttacaactctctgcgtgaagagaagaaagtaatcccagaaaacaaacgccatactaaaacgccgtatgatggtgcatacgttaaagatccggttgtcgctccataccgttacattgtatcgttcgacttaaccagtctgtatccgtctatcatccgacaggtgaatataagccctgagacaatcgctaacagctttgcagtgcgtccgatgcataaatacatcaataagactgcgccgcgtcctagcgacgaatttagctgctctcctaacgggtggatgttccgacgcgatgttaaaggcgtgattccggtcgagatcaagaaagtatttgatcagcgtaagacgtggaaaaaacgaatgatggcgggtgagcgaaatctcgaactgattaagcacgaactcgaacacctgacggacgcgcacaaccaaatgatcaaccctgatttcgagttctacgaagatttcagtgatgaatcaaaagctgtactgaaaacgctgtctaagcaaatgcttaaagccgtgaagaaagtgtgtgagaagaaaatcgcacaggcgaacaccgcacagcttaaccgtaaaatcagtatcaactccctttatggtgcgttgggtaacgaacattttcgttacttcgatattcgaaacgccagcgcgatcaccatgttcgggcagttggctattcagtggattgagcgtaaggttaacgaataccttaacgaactgtgcaacaccacggattacgcatacgtgcgttactgtgacaccgactccatttatgtttgcatggacaacgtgatcgcgaaagtcggcggtgaaagtaagttcagggataacaaccattgggttgacttcctggataagttcagtaaagaacgcatggaacctatcattgataagggctaccgtgaactttgcgagtacatgaacaacgtcgaacacctgatgtttatggatcgcgaaatcatttctggaccacctctgggatcgaaaggtctgggtagtttctggacggcgaagaaacgatatgcggctaacgtatgggactccgaaggaacccgttacgagaagcctaaattaaagatcatgggaatggaaacccagcgaagtagtacaccgacagcggttaaaaagttcttgaaagaagcgatccgtcgcatcctgcaagaaggtgaagaatccttacacgaacacttcaaagtatttgaagaagagtataaggcgcttgactaccgtgaaatagctggtgtatcatctgctaacaatatctcaaaatatcgtgatgattttggatacccaatcaaagggacaccaaaccacatcaaaggcgttctgttctttaaccgccatacgaagggtattcaaggaatcaccccgatcatggaaggtgaaaaggtgatggttctgccgttgcgagataaaaacccgtggcaagctgattgcatcgcatggcaatccggtacgcgtttaccaactgagatcgaagaagatattttgaagtgggtagactacggcggattatttgaaaaacatgtgattagcccgttgcaaaacatcacggaagcatgtaaaattgattacgaaaaacgcgcatccctgaacactctgttcggtgatgactggtaagacctgacggggcagaaatgccccatttatataaatttgtgaggaagatattatgcgtgtatataaaccggaaaaataaatgtctaataaagcactcctgaaaaaactgatcaaaaactcgaatagtcaatctgcgtcaattctgtctgaaagcgatgttttcaataacatcaccaaaactcgaacccgtgtaccgatcctgaacctggcgctgtccggcgctttcgatggtggtctgacttccggcttaactctgtttgctggcccgtcaaaacactttaaatcgaatctggggctggtgacggttgcggcgtacctcaaagcgaatgaggatgctgtgtgtctgttctacgattcagagaaaggcgtaactaagtcttacctgaaatcaatgggcgttgaccccgatcgtgtggtgtatactcgtatcacgacagttgagcaacttcgaaatgacgttgtgagccagcttaacgcgctggaacgtggcgacaaagtgatcattttcgtggactctgtaggcaacaccgcgagtaaaaaagaactggctgatgccctgtctgacaacgacaaacaggacatgacccgtgctaaagcacttaaaggtatgttccgtatggttacgccttacctggcggatctggatattccgatggtgtgtatctgtcacacatacgacacacaagaaatgtacagtaagaaagtcatttccggtggtactggtctgatgtattccgcagataccgcgatcatcctgggcaaacagcaggtgaaagaaggtacggaagttgtcggttatgacttcatcatgaacatcgagaaatctcgcttcgtgaaagagaaatccaaattcccgcttcatgttacctatgagggcggtatcagtatgttctctggtcttctggatctggctatggaaatgaacttcgttcagactccaacgaaaggctggcgcggtcgtgcgttcctgaacacggaaacgggcgaacttgaactggaagaaaagaaatggcgtgaatcggaaaccaactcgatcgagttctggaaacctctgttcactcaccaaccattccttgatgcgattcaggataagtaccgtattcctgacaaagagatcactgacggggcagcactcgaagatctttattctgacgatgaagtagaaccgtcaaataaatttgatctcgatgacgatatccctgatgatgtggatatgtcagaagagtaataaacaactgggggctttgcccccttttaataggtgaatcatggacattgaacaaaaaacaaaaaacattcttgatgaagcaatgcaggacgttattcaagaactgttgatcaacgatgaaaacgatgttgcacacttagtgtacatccataaggtgtattgggataacggcctgaaagtcgaattcagtacgccggacgaagacaaagaaaaactgattccgctggttcacgatgcaatctacgcgcagatcaagccaaatctcccaaagcctgaaaagaccttatgggcggcgttgaaagtaaagctgtataatttctttcagatgttcgctaatctggtttaagaggtaacaatgatcgtcgaaacaatattttcaaatctggtttttaatggtacgtattttgttcaggcgtggccccatttacgccgtgaatatttcgaagggaacgcgcagattctctttgatttgatggataagcacgtacaggaattcaacagcattccttcacaaactgctttagaagtagctctggacaaaaagagcctgagtgatgtagtctacgaagataccaaaaagatgatccgcagcatgaaaaatgcgccggaagatctggaatggttgatgaaagaaacggaaacctattgtcgtgacaaggcaatgtatcgcgctctgtcccgtgcaattgagatccaggcgaatgctgaaaaacctgctggcgaacgcaacaacaaaatccctgacgttggggcaatccctgacatcatggcggaagcgttagcgattagcttcgatagttcggtcggtcatgattacttcgaagactatgaaaaacgctggatgctttaccagtccaaagcgatgaagattgctttcaatatcccgatcctgaacgccattactaaaggcggcgcagaacgtggaacattgaacatcttaatggctggtgttaacgttggtaaatctctggggctttgttctctcgctgctgattacctgcaatcaggtaaaaacgtcctgtatatcagtatggaaatggctgaacacgtttgttctaaacgtattgacgctaacctgcttgatgttgcgatggacgatatcgacaacgggaacatcacctatgcggactataagaaccgtatggaacgcctcaaacagtcgaaggtcgggcgtttaatcgttaagcaatacccaacagcaggggcgaacgcgaaccacttcaaagcgctgattaaagagcttaaattgaagaagagtttcgtacctgatgtgattattgttgactacctggggatctgtgcttctacccgtgtacgcggggcggaaaacacatacatcctggttaaagcgattgccgaagaacttcgcggtttggctgttgaaacaaataccgtaatgtggactggtgcgcagactacccgcgccgcgtgggatgcttctgatatcagcatgggcgacgttgccgaatctgctggtcttccggctactgctgactttatgttagctgtgattgagaccgacgagttagctgatcagggcttgcagttgttcaagcagatcaaatcccgttacggcgataagaaccactttaaccacttcaaactcgaagtgcgtaagggtaatcaacgctggatggataccgacaacagcgatatcgggttcaaatctgattataaaggtcgtcagatgccgaaaacgcttgaagaagcacaaggtgctatggtaaaacaagctgaaactaaccgaagcagtaagttagccgaagtagcaaacagcacagacattcaattttaacggggcttcggccccaatcaaaggtatagtgaaatgaaaaagattctcgttattgtgttcctgatcctcctgtctctgaaactggcagcaatcggggttatggcaaatgcttcctggtggcttgtgtttgcacctctgatcgtgatcggtgtgattaagctggctttctgggtgctgtttgtggtggcaatggcaaatgtattccctaaactgactctctggattgcaaaaaacgcaaaataatcctgattaggggttgacgggagttatgattgtgataatatgactcccgtagacaacgaaacggattaaaggagataccaaatgaacttactgaacaacccatacgacgaagtgatgaacccagaactggatttcagcgcgggttatttcgatgcagtagtgaacagcgtagtaaacagaggtttgctggttgaaatgctgaaaagtgggaaagcggatgttgaaggtagcgttgatttcctctggggcttcctcccaatcgacccagaattcaaactctgctgtaacgaagttcaggccaaaaacgttcttcggtatcttatcaacaaagcataaaaattaagccccgaaaggggcttttttgtatctgtaggtattgcaatcccatacgaaaggtgatactttattctaaacaaacaaaggaggacatcatgaaacttgcaatcgcttttatcttactggttctaaacgcacttatgggctttccgttcccgtggttggtgcttctggctatcccgtttgcctggaacctgttcagaatcggtttagcgggttgtgttggtgtcctgatgcttatcatcggcgctatcggtggcaaagacgcttttatcggtgtcctgaaagccatgaaagagggcgttaaagaaggtttagtgaaatgatgaatttagatttttgtaaggctgaaataaaagctgatgcagacgaagaagaaccgaagttcgatagtcctcacagttcgcgctggatcgtagctgttgacgatgaaggttatgttacggtattatctcgtccgttcatccacgatgcattttttgaatgtgggcgcagtgcggaagatatcgggcttcctgattccgtagaactgccgccaggtgtgtacgaatggatctgtggtttcgaacaaactactgactgggaaaccggatacgtggacgggtgggaattctacccgaatgaatcaacattactgtatagctgggacaatggcaaagttaacgaaagcggaaacgaagcaacacaacaagataatggatctggtggagtctgataaggcgctaacctacgacgaaaagttattcattatcgaaaacttccatgaaggtgcatttacgaataactctgaactgggcgcgttctttaccccgatcggacttgctcgcgatttcactattgatgcttgtaccagtggaagcgttgttgacctgtgtgcgggtattggtgggctatcgttcgcgatgcttcatatgatgatgtacgccaaaccgcgtgaaatcgtctgtgttgagttaaaccatacatactataagttgggtaagcgtatcgtaccggaagcgacctggattaacgcagacgcgttaacgacggagtttgatactctgtttgatatggcgatcagcaatccacctttcggcaagataaagacatccgattttaagggtaagtatacgggcgcggaatttgaatataaagtgattgaacgtgcttcacagattgcccgtgcgggtacgttcattctcccgcagatgtccgcgaatttccgttactctggacggcgttatttccaacaggacgaatcaacgacaacatcgaaatgcaaaaagtttcttgatgaaactggccttgaaatgcaaccaggttgtggcattgataccggatattatctggaagaatggaaaggcgtgaaaccgatgtgtgaagttgtctgtatggaattccccgaaccagaaaccaaacccgcgcaaaaccttttcactttcacaatagagtaaagactatgagcgatcaattaatcaaaaacatggatttaacctacagtgtgcgaatgattcgcctactgaaaaaaccctggactgaatggacggcttacaagctggggatcattgacggtcaaggggaagtattgaaaaacccgaagacgaaggaagaactggaagcatattccccgttccatcgctctgtgaggcacatcaagcgccgtttaaacgcggttccttatatgtctgggttcatgaaccttacaagcgcttatgactcgttacggagccgctggaacctgaccgagcaagagcacgaagagatcatgatgaacctcccagaacttcgcgaaagactcaacgaagaaatggttgcaggtgattcaggcggtagcgtggataatattgcttcgggtgtgactacaggcgcgatcacgaacaaagggccgaaggttctgggttctacgcgtccgcataaacgcaaacgtaaaatcatgaagagtgaagaatgaaaccattaccgcctctgaattatcggatctgggttactgcgaacaattacacctggtttcctatccgtatcaagtacatgagcgacacagcgatcgtgtacacgaacgaaagaaaaacatcatcgggtgtcgatattcctagaccttatccgttttataagatattctatgaatggaaaatcactttagacggcacagagaaagaagttagccgatagaggtaaacatgtatcttgatatagagttcgcaactcgtatcatgggatcattaccacaaagcgaaatcgttcgacggggtggagaattcagtatccattcccgttgtccgatttgtggcgactccatgaaggataagcacaaaaaacgtttctggatattcccgtcaaaacgaggcacacacatgatgtgtggttgttttaactgcaactacagcaagccgttttctgtgtttctgaaagattattacccggatgattatacggcgtatttgatggaatctttcaaggatcgtaaagatttaaaacagacacacgaagaaccgccgaaggaagaaaagaaatatattcctgaattgcagttctgcgaacgtctggacacgttgccagaaaatcaccctatcgttaagtatgttgcaggtcgtcacatacctaaagacaaatacgatcgcctctggtttacgcgtcaatggcaacacctggttaactctgtgaatgcggacgcataccctttaccgaaggatgaaccgcgtttggtgatccctatctttgatgaaaagggtaaaatagagtcattccagggacgtgccttacgtgacaatgccaacgcaaaatacatgacaatcaaagcgtgtgaacactcaacgaaagtgtatggacaagataccatcgatccgttgaaacctgtctaccttcttgaagggccattggatagcctgtttgtagataatgcgggggctattacgggcggacaaatggcgctgtccgatgttccgtataaaaatatgcgtgtttgggtgcttgacaatgaagcccgtcaccctgatactactcaccgccttttaaaattgattgaggctggcgaaaaagttgtgttgtgggacaaatgcccgtggccgtcaaaagatatcaacgaaatgataaaaactgacggcgcaactaaacttgaaatcatgcagtatttgaaagacaatactgtttctggactcacggcaaaacttcggtttaagtcgtggaacaaatcaccgaaaaaatgagattgatatgactgataaaactcctgtgtttaatagctgtgcgcacctggttaaagccgatgatctggaaatggtagaaggtttctaccgcaatgcattgcagaacggaatcgacccgctgcaaaagatgctggacttgcaaaaccatgcacaacaaagcctgtctgataccctgaattgggttccacgtcctgataacctgaaaacgtgcggtgagatcctggactggctgaaactgcaagatgatgcgatcgcagacgaaacccgcgaactttacaccgctctgggcggtatgtctcgcggtgcaaaagcggcttccggtgtctggaaaccgtggaaagcaaatcaccaggaactgcgtagccaggtattcgcagaaatgaaagaagaagacaaactggaaatcctgtttgaactgattgaccagtggcacttcttcatgtgtaagttcctcgcgctgggacttgatgcggaaaccatctacaagctgtatgctctgaaacaggcggaaaacctgcgtcgttgggctaacaactactaatggaactcaccgcgctacatgccgtatttgctttgtcttatatcgtttgcgcggtgataacgtatctcttcggatggtgcgttttccacgttaacggtgttgacagaaaagcctctttgatagtattatcattgctatgggttataggttttttctacgtcatctatgaggggcgaaaatgattgacaaatactatatcattgttacgaaagacaaagacggctttactattccacacgttgaaaacgggaaaacgccggaactgtttgcatcaccgcaacttgcaaaagataaattagattttatccgcaagtgctacgaaaccaaactgaactacacgccggacgaaccgcgtttcagtttcttccgcaaaaccgagcaactaccagcaaccgaagaacagaaaaaagagatgcgttggtttattgagaattcgaaaattcaaggggtattactcaaattatgagcgagttaacatttgatgatctgagtgacgatcagaagtccgcgcatgatcgcgtgatccacaacatccagaacgccattcatacaactattacgggtggccctggtgttggtaaaacaacactggttaagtttgtctttaacactctgaaagggttggggattagcggtatttggttaactgccccaacacaccaggcgaaaaacgtgttagcagcggctaccggaatggacgcaacaacgattcattctgcattgaagattagccctgtgactaacgaagaactgcgtgtgttcgaacagcagaaaggcaagaaagcgcctgatctgtctacctgtcgcgtgttcgttgttgaagaagtctcgatggttgatatggatctgttccgaatcatccggcgcagtattccaagcaacgctgttattctgggactgggtgataaagatcagatccgtccggtaaacgccgatggacgtgttgaactctccccgttctttgatgaagaaatctttgatgttatccgtatggataaaatcatgcgtcaggcagaagggaacccgattattcaggtttcacgggctgtacgtgatggtaagatgctgaaaccgatgtctgtcggtgatctgggtgtgttccaacatgctaacgctgttgacttcctccgtcagtatttccgccgtgtcaaaacgccggatgacttgatcgagaaccgcatgttcgcttacactaacgacaacgtggacaagctgaacgcaacgatccgtaaacacctgtacaaaacaacagaacctttcattctcgatgaagtgatcgtgatgcaggaaccgttagttcaggaaatgcggttgaacgggcaaatcttcaccgagattgtgtataataacaacgaaaaaatccgagtcttagaaatcatcccgcgtcgggaagtaatcaaggcggagaagtgcgacgagaagatcgaacttgaattctatctcctgaaaacggtatcgcttgaagaggaaaccgaagcacagattcaagttgttgttgatccggtgatgaaagaccgtctgggtaactatctggcctacgttgcgagcacttataagcgcatcaagcagcaaacaggctataaagccccgtggcattcgttctgggcgattaaaaacaagttccaggatgttaagcctcttccggtttgcacgtaccacaaatcgcaggggagcacgtatgaccatgcgtatatgtacacgcgcgatgcgtatgcgttcgcagattacgatctgtgtaagcagttaatctatgtgggagtaacccgcgcacgttacaccgttgattatgtataaggggctttgccccttttgaggttattatgaaattgactatccttgtaaaagacattccccgaattctggaagcactcgataaaattcgagaaaaagacccacatgcgttcaatatgttcgggatgtatagcgcagcagatccgcaagaagttattcaccgtttgcgcttcattgaaaaatctaacgatgttctgtattctccgaacgggccaagttattcatggagtcctattgcaaaagaagtcgaactgacttatgatcaatatggcgttatcgtgctgatccttcgaatggcacgaaacattcgtgaagataaagacatatggacattaatatcatgaaaaaagatatatctatccagatcccacgcctccacgcggaagcgattgcagatctaattttcaaaacccctgttcaagaacttccgcatttcatcgatcgtgatgtgttggacgaattcacagaagctgttgaaaacgcgaatcgtctggaaaaggcaatttatcattccggtctgcgtcagttcggtatgatgactttgcaaagcaaagagtttgaaacttttgatatcaacccagaagttgcgcttacgcttgcatacttcatggaagattataagcggagaacttcatgagtcatttacccgtagattacgtatgggattatgaaacggttggtccttccccgaacgggaaggtgatcgaactctcatacgttccgtttgttgatgatccacataacccgccaacgttcgcggaattggtagcacgggggcgcaagtacaaatttgatttgcgcaaccagcctgatcgtattgctgatcagggaacaatcgcctggtggaaacaacaaagcgaagaagcccgtcaaatcctgaaaccgtcgccggaagatctggaactgtatgcaggacacagacaattctttgaagacctgaaagcggacggtgtgagccgttggcaatcactcgattatgttcgtggccctgaattcgatcgcggtatcctggttgatatcgtgcgtaagatggttggtaagatcgacatcttcgaagatatgccgaccgtgttctggaatagtcgcgatgtgcgtacctgtatcgaaaaccgcctgttaacgcgtgatgcttcgacctgtcctcttcggaaagggttgcttgatggttttgtgatgcataattcaattcacgattgcgcgaaagatgttttgatgatagtctattcattgagatatgcgctggggctggaagaacccccaagtgaagaagaaaccgatccattgagtctgccgaggaaaagatgattaaattatcatttgtaggtaaaactgtacatgcaaaaacactgaacgaagcgaaagcgcagatgtttgacattctcatgaaccccgcgttcgttaaagtcgaatacgatgaatatgttgttcagcctggagatagcatgtattcaatagctgaaaaattatacggttgtggtgagcgctggcagtctatcgctaagttgaaccgcaaaaccgttagcaatgcaagctatatccttccagggatggttctgaaattgcctcagttagtcgaattatgataaaaagcccttgcattcgtgcaggggctttgttattttgtagggactgaaacaaaagaggataaaacatgtttggtgatttgaaagaaggtttgaacattttaattggattcgcgatcattggtgtgattgcttgtgtgtccggcgcggtgtggttgtcttatcaggcgatcgtgtggttgggcgaatggcttcacattctggcacagtaaggggatattatgcgtttatgtttagttggtgtaggtttcggtcgtgcgttaactcaagggttaatcgactcaatccgctggattcaaccaagcgttgaactgtattcattacctaaccggatcgaatactctgatccaacaccgtacaaaatgaaaccttatcaagcgccacgcgttaaccgtgcgttacaccgtcaatctgtgaacaggggcaaataatgagcacagcaattccacttatagtaatttttgtgttggttgtgctgtttgtcatcttcaaagcaatcgaccaatccatagcaagagaatggtttagcgactactacacgaagaaagcgtttataaaacattttcgaatggaagcagtgtgtacccacgtatacacggagctaaaccaggttagattctcattctcacagaagggaaccgattatgacatcacggtatctctttccaaagcaaaagagctttacgatatcacccaaaacgggggaatccgtagaacacttaaatcattaaaatagcactttttgttaaactagcctcttgcaatgcaggaggcttttttgtatattacacacatcgaaacgaaacagacaaaaggaacgcatcatgaaaaacttagaagccaaagtagttaaagtcctggttaagaacgggttcaatgaaaaagacgcagtagcgatggttgaaaagaatctgaatgatgcgttgaaagttagaccagaagcaaaacctgctaaactcgcagaggtgattgtatgcatcatgtaaaagtaagcatcaaggatatcacggttggtgacaccgtgatccacgaagggaaaatgaagactgtcgggaaaaacgatatcaagcgcgatcctttgtttggtgtcctcctgtttggtgatagtttcaatctggggagaacttttatcgagcgggttattttcccgaaatggtatcaagggaaacgggtttaacaaatagcactttttgctaaagacttcacgggatagctttgatatagttatcccatcgaaacaaaacggaaggagagttatcatgatgcagaacggttctttaatcaaaggtcacggcaaattcctgattcagcagatcaacgacaacaaaggcatcatcgcctattgcgacgagaagatgaacagcgatatcgcagcatgggaaaagaaagagtatgcagcagtgaaaaaagccgcagaaaaatcccttgctaaagcagaagaaaatttggctaacctggagaactacgcatgaactacaaaactttcgtgattaccgtcaaaactaaaaatggtgaagactgcttcttgtatcaggcaaaagacgagaaagaagctaaagcaggtgtattgaagttcattaaacgcgatgcattgagcaatatttgcgaacaaccaaaataatgcttgcaatcctgaacgcataatagtatattacacacatcgaaacgaaacacacttaggagattttaccatgtatacttttgacgaactgaaagccgcagcacagcctttactggacgcgatgcacaaaggtcgtaacactggcatgtggttcagtgattacactgaaactgtgttcgttctggaaaaaggccgtaagtatcaccgtatcgtgcaggatacccgcaacaaagaaacgggtgaaatgttcaatcagcgttcagttgctggcttcatcgacaatgacggaaatatcttgaaagccgctggctggaaagcacctgctaagggtattcgtggtaacatcttcaacaacccagagaacgcgatcgaccggagtggatacgttcgctatcttcgctaaaatcggggcttcgtcccctttggaaattaaaatgaaactatcagcaaccgccagttggtcaatcttcggactgatagccgcaggggttttattcttcgcatggcaatcaagagatccgaacaaagcggcgtatgaagccgcacaacgagtagtagaacaggatgcagaagcacaacacgaagcaatgctacaacagcgtcgtgatatgggctttgtggagactgtgagttacacaaacgcttttggtgatgtcactacgcgctctgtaaacgtcttagggcgcacgaaagggacaatgctcaccatcagacgggaaggaaccggaaagctcgtagacgtgtgtttcagtgcgattacggacgattccaaacgcgaactattcgccccgtatttttctacgcctgtatatgctaaatttgacggcggagaaacaaaagagtttagcgcaagcagaggaagtaccgaagattttctgtgtattacttccccgcaacgcttccttttcaatatggatcgtgctagtgttatgcaagtccagttagtattcctggatcattactccaaagtgccagaagtgcatgaatggaacctgaaaacatataatgaggttgtgaataaatgagcagacgcccaaagaacagcaaaaccgaaatgtttgcaacgtttgatgtaaacggaaagagcattgagggtaaaccatgcacgaactcaaagtttatgcatatcgccggattgcctggtatgagtgttaaaacttcttactgttgccactacaacgaagaaaccacctctgtttatttgggcgaagaactcatggctgaacgcgtcatgcaatgtgtgcatttccctggcgaacgtccagaagtgaactgttttattgttggttatcataaaggtattgtaaatgagcaagtataaaattggtgatatgtacgccccgaaatctatgttaatggctgtgtgtcaaatggcatccgaagccgacccgattcgtcgtatgtatgacgcgttgcgtaagaatccgatggacttcaattcaccacgccggatcagtatggtgtatgaagaaacggggattctttatcttgaaggtattcccgttcctatcaaattcaacgatatgaaagggcttttcaatccggtatgggttgcaccagaaccggaaactgaaattacgatccacgtcaataaaggtgaggaagtaccgcgcgaaaattccgctgtagttctggataagtttttcaagaccgctcatagcgtcaaaaaacgaaccgttagcgacgtggttcaccacctgtccgcagaggttggggagatctccgaatgtctcgttcagcctcaacgcggcggtgatatcgtcgaagaaagcgttgatgcgatcgtgtgtgcgttggatgtgatttacctgaaactgggtactacccacgggacaacagaaatcgcgcaagtgatcaataaactgcttgataagaaattagataagtggtactctacttgtagttaatcaattacgaggatcggatcatgttggtttatcgcgttgaattgaaagcgtctatattatccaaatatgatggatggtgtaagcaattaggcccgtacacgggttgtgttggtgatgaagacgatctctatgagtatcttgatattcatggaatcgagttcggtttaaacttcggtatctccgagactcgtcaccccgcaccatgcgaagaccttcgtttaatgcgtaacctcaaaaaacatggtaaaaattatcgtagctatattttcggcttctcttcattgcagaagttgtctaaatggttcgatagctgggagcggcaaattttggagaatcagggatatatctgtatggtgtacgaaactgatctcatgtttgcagggaacaaacaatgtgttttcagcaaagccgcaaccccgatccgttttattccattgtcagagatttattaatgccaacatatacctataaatgcaccaagtgcgaaaaagaattcccgaagatgtccagcatcgcgagccgtgacgaaccgaaagattgtgattgcgggggcgaggcgaaacgaacggttgataagccgcagatggtgaaagatggttttccctatgtctaaaataaacgaaattgtgcccgacgattacggatatgccgatgggtttcaaccgcaagagtattgtgatagactggttattgaatttgattcagaatctgtgtctgaaataacgcggattaaccaatctggttttgagatctcattaacacgaatgcaagttgaagaactgatacccattcttcaaaaaatcaaagatgcttaaaccccgaaaggggttttctttttcatagaaccctatataatgcctgagaactaataaagaggtgaatatgagtttagatttcttaatggacgataacgagccgcagaaagcaccagaagccccgacaaagggcgctaaggtggatgaatcattctgcttgagcgatcgcgatcacattcgcaaacgtccgaacatgtacgtgggttcagtgaacaaagaagcccatgaacgttttatcatgggtaaattccgcaaagtggaatacgttgaagggttggtgaaaatcatcaacgaaatcctggataactccatcgacgaagcgatccgaactgatttcaaatttgcgaacaaaatcgaagtcaagattgatcacaatctggttactatttcggacaacgggcgcggtattccacaagatgacgtgagaacgccagaagggaagattgttcctaaacctgttgcagcctggacaatggctaaatccggttctaacttcgatgacgaaaaccgtgtaacaatggggatgaacggtgttggttctttcctgacaaactgttacagcgcaatctttatcggtgagacatccaacggtaaacgcaaagtcacgatcaactgtacggacggagcgcagaacatggattaccgcaccagcccgacgaaggagcaagggacaaccgttaagtttacccctgacttctctattttcggtgtggacggtatcgacgaagagacaaaggaagtcatcaaagatcgccttatggcgcttgcagtggctttccctgccgttaaattcacatataacggtgatatcctcccgaacaaattcgcgatgtatggcgcgatgtacggtgataaaacgattacccagacaaacaacaaaatcagtttcatcctggcgagcacagaagacggtttcaaacagaaatccttcgttaacggattggatacgaaaaacggcggtgttcatgttgacaccatgatcgacggtatctattccgaactcgaaccgatgatcaagaaaacacacgctatcgagatcccgaaagcccgtgtaaaagaatgcttgactttggttgtgtttttgcataacttcaatgcaccagcttttgatagtcagacgaaagaaaaactgactaacaccgctggggagttcaacaaccacgccggactgaactacaaaaagatcgcgaaacagattatggatacttctgaaataatcactccgatcattgagtccgctctgattcgcaaacaggcagcagaagccgcagccattaccaaagcgaagaagaaagcgaaaaaggcgaaggttgcaaaacatgttccggcatcagggatcgacactgacggggtagaaaccactttgtttctgaccgagggcgattccgctgtagggcagtttatcgagtgcagaaacgaagagacacaaggcgcatttccgctacgtggcaaaccgttgaacacctggggaatgagtaacttagaagtgctcaaaaacaaagaattgtctgaactcatggcgatcctgaatctccatccaggcgactcttccgaaatgacttacgacaacatcgggatcatggtcgatgcggacgttgacgggggcgatattctcaccctactgattgcgttctttagtcgctggcctgagttgttcgagaagaaaaagatccgttatatccgcacaccgattatcattgcgaaagtcggtaaagatgaaaaatggttctactcccttgaagatttcgcaccgttccgcgataaagcgaaagaggtacgatatatcaaagggctgggttctttacgcaaagaagattacgatcgggtgttgggcgaccagttaaaatacgatacaatcgtactgggcgacgaatacaaagacgttctggaactgtgtttcggtgatgaatccgatccgcgtaaagactgggtgaacggaaaacataaattttcggtgaaatgatggaaagaagtattaaagacgttgtacaggtagaagggcttacgtttgccctttacacaatttattctcgtgcgatcccgcacctggtagacgggttcaaacccgttcaccgtttcttcgtgcattccgcagcgaaaggcggtacaggcttccagaaagtagcctctatcgctggcggtgttgcaatgtatggttatcaccacggggaaacatccgttgaagaggcattgtctcttatggcggcgcactggtgcaataacatcccgctttttgaccgcgatgggttctttggttcccgtctggttaaaaagccaggcgcaccacgctacattaaatgtaagctgtctccgctgttcaaggctatctacatggatgaagatttaacaattccgcatgaagatcctgaacacgtaccgccagcctattacctaccaatcattccgatggtactggttaacgggttcagcgggatcgcgaaagcatacgctaccaacattccaccacacgatccaatttcggttctgaatggatgtgttagttacctgaacgggaaagatttcacactggatctgaaatacccgcatttcaaaggtgacattgaaaacggtacgatgtacggcaagtatgaactccagggtaaaaccaaactggtgatcacagagattccggtcaagtacgatcgcgtgaaatatatctctatcctggataagctggaagagaaagggtatatcgtaagctataaggatctatcgaaagaagattttcgctacgaaatcaccctgaaacgcgaatacgcaaacgggcttacccgtgagaagatcctgaaagatttcggattgattgagaactcaaacccgaacatcaacgttatctttaacgggaaactgcattcatacgagcgtcctgaaacgttgctgaaagacttcgttgatatccgtattggtgtttaccaacagcgtattgataaacgcatccaggagactaaagaagcgttagataaagcgctggcgaaggttgacttcatcgaccagatgatcgcacagcctgacgcattgaaggggcttagtcgcagcgaagcggttaaacttgtctctacgtggacgggttgcgagaaccacgccgaaattctggttgcgatgaacatctatcatctaaccacggatgaacgtcaaaagctggaagacgaagcgaacgaactgcgtaagcaactgaaatactgggaagaaacgaccccgaaaactgaatatctcaatgatttgaaagaactttcgaagaaattgaaataatttacaaaaagcctcttgcattgcgggaggctttttgttatagtgtcctcactgattggggaggatataaaatgttcaaaactcgtagcgatatggaaataaccatttgggccaaaagcatcatggcgaagcatggcttatctcattggtctttcaaaatcaacggacgtttcaaacgtactctgggacaatgcaattacagtcgcaagtcaattgaattaagccgttctcacgttaaggaagatatctacgagaacgttttagatactctcatgcacgaaattgcacatgctctgaccgaaggggctggacacgggatcgtatggcagcgtaaagctatcgagttgggcgcacagcctacaccatgcaaaagccgtatccgtgagaaatcagtaattcaggaaagcgaaaaagacatatacgcgtttttcttgaaaactccgaacggtgaagtttatcagtgcaatatgaccgaaaagatgtacaatgagatccaggaaggtaaacgcaacattgcaaacatctacatttcaagaaacaaacgagcaaccaaagggcgcttagtagcgcgtaaattgacaccagaacaatatgcagaggcgattcaatgaaaccatatgatgcaccaaaaacgggaaaatatattacaatagctgtgctgtgtactattgcaatatgttttgtaactgctatcgtggtcggtatcatggatatgaaagaccgcgaacgtcagaagcaacaggtttacgaataccttgaccggatgtgtacacctgttgaatatgggcttgatcaaaagcctgtgaaatattcatgcgataacatcatctttaacaccaagtgagatataaacaatgaaattacgtcagttagcaccacaaaccattcacacaacgggcttcgataaaggcgaacgcacgaagtttaaaatggctaccagtgcgaaaacatacaaaatcatgtcatcaaccatttacaaatacaagatccgcgcaatcattcgcgaaatctccagtaacgccattgatggtcatatggtagcgggtaacatgaacccgttcgatgttcagttaccaactgttctcgatccgcgtttcatcgtccgtgattacggcacagggttaagtgactggatggttaaagaggtgtttgcaacctacttcgaatccaccaaaaccgacaccgacgaactgatcggggcgctgggactgggtagtaaatccccgttctgctacaccgaaacattcactatcgaatccatccaggacggcgttaaacgtgcgtacacggcttatatggataatggtgaacctttcgttgaccaaatctacgaaatcgaaacagacgaacctaacggcgttcaaatcaccgttccggttaaagtcgaagatatcgaagaatgggaaagagaagcggcgcgtgtttacgaaccgtttacgggtatccgtcctcgcttcatcggtgttcagattgatgttaactggcaaccaaaagaagcagacgatcgcgggatcattcgttataagtctgcaaactattccggcgtatatgctcgtatgggtaacatttgctatccaatcgatttggacatgttcgaaaactcactgttctattgctaccgtaacagcaattatgcatatattctggatttccctctgggatcgctggacttcatgccgtcccgcgaagagttaagccttgataaagtcaccaaaaaagtgattacggatcgactggacaaaatcaacaaacgcttcgatgaagagttgatggaacagtacaaaaagcagaagacaacccgcgataaactcgtatggttcaacaatctgcctagtttgttacagacatttgtaacccgcgataaccgtttccgtgtgggtaaagaatcgctggcggaaatcctgacacgtatcaaaaaccctgatacagcaaccggaaaatatatctggggcttttgggctaacccatatgacgggaaagattgcgtatatgagcgcgtaggcagtggtcgccgttatgagaagtataaagcggaaacaaccaagcgccaggacgttatgcgaattattcaaccgtggcgacagaagaaactgttcattgttgaaaacgacaatgaagcgcgttcactccgtccgtacctgatcggttattgcatgatgcacggttctgatcgtatcagtttcgtgacgaaagagatcaacagcgatccggtacaggatttgatcaaaactggatattacgatgaatccgaaattgtcacgctgaaaaccagtgaattgacgaaagaatttgaaacatacacggaagaccgtaagcgttggaaagcaacgcgtgaatcatcttctggtgattatgaatcgcgcccgaaaacgccgactgcatatcattacttcctggatgaacagggcaacttacagaaaaacgatctgtacctgactaaagcacagttcatgaatctgggtgaaatgtacgcgatgcgcctctatggggttgatgaatatagccgactggacggagaatcaccaaactattctctgggtagcatcgccagcagtatgatgaccatgttaaaggtcacagggctgaaagatgtgatggttctgcgaaactctctgtggagtcgcatttcagatagcaacatgaaatgtcttgatgattatctggtaaaacgttttacagacgcagcgaagaagatgaaacctaactggttccctgcgtggatttcatcgaaccacggaagcgagatccgaaccctgcgtgattctatgggtgtaacccttgatcgtatggttaaaaaccgatacaatccagaattgtatttgttgcttgattatcttgatggtaagtttacctacgatacgatcgagggcaaaaacaaatctaaaactgtggtacgtaaccctttacttcgtgaaatgtcaacgaagtattacaaaatgcggaaagatatgaaagaacgcgttgatactgcttacgatttatttgcagaacgcaacccatcaatccattacatgttattgcattcgtcttattctacattccgcagtatgtttaatgacgaaaaacttacgatggatttggtcaaccttatacggtggaaataatgagaaacgttaagatccttgatgatgtacagaagaaagcagtctacgagggctttctgaccagcgcgaacaaaaccgccctggctaaacaatttggtgtaagcgtccgaaccatcgggcgcgttattaccgaacaacacgccaaatacaacaaaccggaaccgtctaaaccacttccggttacagataccagttcaaaaatgatcggttctgaatcgtttattactctggtgttgaatggtaaaatcgttactgctgattcgtcgcatcctaactttgaaaaagcacatgctttaatggttaagggtgatatcgagggagttgctaccctgctggatacaacagaagcattgaagatttacagtaaaggcaacattaagatcatcgggcataaagtcttgtacaaagatatcgtgtttgacagcgggatcacgcaacgtatcgttcgcgaaatgtataacgatcgcccttatgagcacctggtgaacttcttcgagaagttgatggaaaacccttcccgcgatgctgtgtaccagctttacggattcctggtgcataacgatatcgaactggcagatgacggggatttctacgcgtggaaacgtgttcgtgaagacttccgcgatctggcttccggtaagttcgataactcacctggtgttgtggttgaaatgccacgtaaccaggtagacgaggacaaaaaccgaacctgttcatgcgggttgcatgttgcggctaaatcgtatctgcctcactatggcggcggacgtggaaaagtcattcaggttaaagttaacccgcgtgatgttgtagcaatccccactgattacgataacgctaagatgcgtgtatgccgttatcaggtgatgcgcgatgtgactgtgggatttagtcactactaaccctacaacaacgcctggagcgattcaggcgcggaggatttgattatgaaattcctacagagcattcctgactactggcagaacttgagcggggcagaaacagccatcaaaaccgctaaagaaatctggaacggaggcaacgttaccgctggacgtacagaagacggagaacagacatacttcaaaaaaccttacggtattatcgcaacagcccttgcatttaatctgggttatgttatgctggtactcgcaacggttcagaagtgggtagagataccgatgaaatggatcgggacgttgttgattcgcttagttcgcttagtgttcggcgcaacgatcttgattttgtcatgccctatcttcttgctggtactgacaatgaatatgaaaactggtgtaaacaccaaattaggaaataaactggtgaagaaaaatgaaaagaattctgacaaggcttgacatccacaaatatgctgttaagataggtgacatgaagcgcggtgacttcaccaagttcgaaggggttgacctgaaagaacacggcttctacctggtagttgatgataaaacgggtaaagtagtatttcgattctacgtagccccaaatcaacgccgtaagactggcgcaaaccgtactctgttacgcatcaaacgccgcgaacatgaaccatcagcgatggtggccttgctggatagtgcttctctgtacttcgttgcacacgataagattaaaaacctcttcggtttctcgaatcttactggtacaatagcggaaagcgcgattcagatgcggttcggggatggtgagaactatactgaatacaaccgcgcactaaatgatctgtttgactttgaattccaaccatactaattgagataatgaatatgaaactgttttccaaaatccgttctgtagacgaaatcgtagcaacttttgacaaaaccctgaccgaactggaagcgcgtattgcgcatgatcagaagcaggtcgaacaggtagcagcagaccgcaaagcagcggaagaagaacatcagcgtaagctggctgaactggctaccaaagaaagcgatcataccgcaagcgcaacacgagccggacgtatcgcggataaaatccgcaaactgctggattaattatctaaaatggggctgaaaagccccaataaggaaaataatatatgtttgtaatttcttcgtactatgattcacgtcaacgagtatcgttgtcttctatttccaaagcaccaaaagatatagatgacttcggattgcttaactttgtcaaaaaagaaatcgaccgcgttgttccagaaaaatacagaattgttaaaggatctgatagcttaactatcgtaaaactgtatggcgaagtcagtattcaacatcatgtgccattatatcctcgatgaacaacctggtagcgaaacatgatttcaaccgcgcttctactcaccgcgatcgcaagcgagcacttaaagaagcaaaacgtaagcagaaacataaaggtaagtgtgatgaaaaccgctttgattattcttgaggaaatcccagaaaacacggggctgtatctcgttgaagccgacgaagatatcattgaaatcctcaaaaccgctcacggacattatgtgaacggatgcaacaataccccagaacaggatcacgctgtcaatatcgttaacctcatgttagggccgcgtacagatgacaacctgaaatgggcgagcgaatccaacgttcctcatgagtatgtcgggatgtattatcagtgcaacgttgacgataaagcgccactgataccggaaaaacagatcgatttagtagttcgaacaggtttcttcttatgagttcacaaattctgttcagcaaagaagatccattaggcacagattcatcggtgcagcgcttattctggcacatggattatgcaaaaaatcgttgtcgtaacccaaacaatacatggggaagcaacgaagacattgataaagcaaaaatttatcctcgcggaaaagcatactggaaaatttttgatatccatcttcataaagttatgaaagattcgaacgcatgataaaaagcccttgacttcggttgagggcttttgttatattggccttgtcgaaacgaaaccactaaggagattcaccatgactaacctgactaaagttaccgcgacatatttcatttcttctggcgctaaaaacgctatgtacactctgcgtgtagagcgtcgtggaggtgaattcacttctgataactatatctgcaacctgtctactgacccagataaagcggaagcgaaagcgcgtgaatacttcgatcgaatggtggatcgtctgaaccaaaccgatactttccagatggtgttccagggcttcgcagatttcgatctgtttgaacgtcgcggtaaactgtccgtacaggataccgaaaacctggaactgctggaacagggcatcatgccaatcggtaagcgtaaaggtgaagtgattgctgatatgccgatgtatacgattctgtggtgggctgatcagtgcaaagaaaacggcaacgatagcccagtatttcaggctatttgctcttactgcatgggcgtagcgctggagaaggattacatcgctaaacgtgaagagatccgcgcagaatgggaagcagagcgccaggcgaagatcgcagcagcacagcacatcggggaaatcggtaagcgtatggaaatgagcggggttgttgagaaagtgatttctctcggatatacccaagtttcttattacaccgaagtggaacgtttcatgaccaaaatcaacgtagatggtaacgtggttatctactacggaaacaaaattgttgaagagggtgatgtgattcgcttcaaagcgacacctaaacttcacaacgaatacaaagaagttaaacaaacaatcgttcagcgagtaaaggtattataatgacatacgaagaaatgcttaatgaagtgtgcgcgggtaaaaccgcgtaccgcccgattaacccagatatgatcgtgttccgcgaaggggatacgatcattcgccgttctcaccgtaaggttgagattaaccaggtattcattgccagtgttgaagaacagaaagcgaccgactgggatatagttgcagaagatgataacaacgacgaacttgacccgatcttagtcatagataatcacccactgggtgttcgtccatacatctatcacaatcaatacagaggcgaagtgattctatcatgacacacgacgaagccatgaaagccgctacacgcggttttaaagtcgcccctgtgggtaaggctgggttctttgtatatcacagcgtagaggctggtttccggcgcattacgataggtaatgttggatactggaacgatgaatatgttccgacaccttacgaactcatgcgcgtatgggacatatacgataaaagcccgatgacgaaagtaaaagatttcatcaatcgggctttgagtagtttgaaactgaaattatcatcgaatcctgcctaaaattcttgcggcctgattgcacacggtcatcaacttcgtatcggtgacttcgggcttctgtatataccattccattagaatcgatccagaatagtagttttcgagattgaaataaggacaactaaaggtatatgctaccggaacaaggtcttttgttggaagatacgggcttgcaatatctgagatatagtacagcccgtttatatgtctattatactcttccgatgtcttgtctataggatagccacccagatttttcgggttaatctgttgcggtaacttcccttcatacgcaattatatcaacaaaataattgacattcttaggtctgaacccaaagattgccgaaaaatccgcacccgtagttaaatgcactatgtttaactgttcgatggatgcggattcaaacttttttgccttttcaatctccatcgtcggcacgtctataacgcttgaagatgttttccagactgaaaataagtcatcccacttgtaccatgttacgaacataatgaaaatagtgacgataagaaccaatttaatgaatagctgtttccatgttttgactgccatgatgaacgatattacccgttcaagcaccgccaatttatcttgtaatagcgccatgtttaatcctcaagttcggggatgccgacccccgaacatatttaggaatttacttaacgttgcgtaaccaaaccagaacggttctgacctgtacgggcgttcagatagtcataccatctggtcgcctgagaagaaataacctgatattgacgatatccatcatgtatacgtccgttgttgtcaaaatcgaatacaccgccgtcatccatagtaagacgtaggttgacagcaggaccgttttgaatagtaattacactgatatcaggtgttgattgtgctgcaactacagtaccgaatgcgttgccgttaaaactaccaccaaccgcaggataaccggaaggttttgaatatggtgaataccaaccaaccccccactgaccacgataacgggcgttgttatagtaacgttcatataccgtaaagttgatgttatataccgattgtcccgccattcgagacatccaaaatggtggcgttaatctcacttttgctccggcttgcgccatccatctttcacctgtttcatcaacggctgaagacccaatccagccgggtacacctacaattgccatattatttcctcaagggccgctagggcccttttatcatttagcctctaattctttaacccgagcagtcagttcattcactgagttgacaaggagagcaattagaccgttatagttaacttgacgtttaccttcatcgttcatagttactgcttccggaagaattttttcaacttcttgagcaataacaccgacagtacgtgtcttatcatttgaatctttgatgttataagtataaccattaatttgattaactttatcagtagcagattcaatttttttaagattttccttataagctttatccgaacggatataaacgttataagcctgcattgtaccgtcacgaaggttcatgaagatggtgtttttgttataatacgctgcaccagagttatgagtgtttttaaagcctacaccaaaccaagaacgaatttcgatattagcgtaatcattatcggcggcgtctcggccttggaaaatacctgtaccagaaccgttgccgaggctaataccacggttttcaacttcttgcatattaatgttggcgttcatggttaatgtgccagtcatagtgccgccaccaagactgagattatttgaatgaacccagtttaaagcatcgcccgcccattcagaaccaccaaaagatttccagcgcgttccctttaagttaccgtcatttgccagggcagcgcctgcgttaccccaagaaatagcatcacctgctgtactagtaaccgtgagacctgaataatgagttacaactaaaggagtgcctatagaaacttggcctgttccgttatttattgttaatggacgaaggccgttccaactaccatacggatctcccgaattagtcaacatgaaataagtactaccgccatcgtttcggataaagaatccatagttaccttgaacagcgcggaattgtccgcctgaactactcgatgtactttgaacctccgcacgggcgcgaacataaccagcagtcgaaacctgtagttcttcctgtgcgtcggtagtacctgttgccagtctccacacaccaccctgaacagtttcatgccagattgtgtccgcgttaccgcctcggaactgacgcaaatagtttttcccgccctgtccaacagtaggtaagaaatattgcgctggtgtgccctgtggaacgtcgttataatacgatggtacgtttacgttaagccccaatttggtgttgatagaagtcgaaccagtaccacggaaataatggttatatcgtccgttgccgtctttatagcctaagtgggtaacaccatcaccaaccccgtttccatcaccgtttgtttcaacacgaagaatcgctgagtttattccttgcgaatcataatttacgcctacagaagcacggttattgaatacacccagaccattaaatgtagcctgtccaggaacggttagatggttagcgagaaataaagttccatcatatgcaaaacgagttgcatatgcaccaccaccagtacgaacatatacgttctttccggtatcggcgtagaccaaacccagttcattacctccagcatcctggaagtataggtttcggttcgaatcgcctttaatagccatttgtgtaccaaaaatagtaccactgacaacggtttgcatcccgatcgttaaaccggaaccagtcatttgtagttgaccattttccccgttcatcaacagttgccctgtcaccgatccagaagcgcctgttgtcttattaggtggaccaaatacctgtataaacatcacacccgcaccggatgctttctggttaaacagatgtgcggctaaagtagcaccacccgcaggatcgcttgtatgtgatttggtattaactaataaactgtatacgcgagtttccgatgacggaaacggatctgtaactgcgttgttatccgaacgcgttgctacagtatacaccgccgatgaattatcggaaataaggttaatgcgacgaggaagagttaatgaagcattgttcgttaacgtcaagttgcctgtcatatcgtcgccagctttcttcacctgtgcatcgttcgttacgttgcctaatccgatttctgcctttgtcggcttatcgttttcggtgtagattttaaagcctttatatgtgattgtgtttccagaagggagcaaaggcaagttcgcctgactccagatagtattaccgccaacggtagtacccgcttttaaatctgccattattagatcctcaaatgcttttatgatatttataaaaagaaaaagccccgaagggcttttaattagcgggatttaagttccctgacttcctcacggagttcttttactgcgttaaccagcaaggcgataacagcagaagaagaaacagttaagatctcgttctgttcaccatcaacacctttcttaacagcttccggtaatacttcttgcagttgttgtgcgactaaaccagcctcacgggtagtttcttcacccccaatgtgatttgctttgtcgtacaccataccatcaagtaaatcaactttatccaatgcattttcaatcttactgaaattgcttttcagtctttcatcagaacgaatatacacatcgctaaagctaccgttaccgttcattaccaactgaatgccggatgaagggttgcgttcaaaataaaccagatatgatgcactatcagagatttcaatacggtttccacgagaagcatcaccagcatggaagatatacatatcgcgagggtttgcaccactgcgaataaattcaacgcgtccgttgccactaccgtttaatgttaaatttccattgtcaatataactgcttgactggctgatacgtccgttgactgataacgtatgtcccatcgagacattaccagtatcattatttatatacaaaggacgtaggttattataacttccccatgcatcacctgagtttgttaacatgaaataggtgttaccaccgtcatttcggataaagaatccacggttattgtatgcaatacgcaatccgttggctgagttggaaataatatcaccataagatacaaactcaccagagttatcaaaataccattgacgatctaccgatccagtacggtaatggactgtaaacctgttggtgtttaccaacgtacccatagaccacgcaccgccagcctgagaataatattgcttaataataggccagtattcagatgtcgatgtagtgttaatattctggaaaatcggagcttttgcagtgctttgagaagcccaagaacctctaccttcccccgatgcatcaaaataaccgcctgtttggttgatggttcctgttaccgtgcctcctgtatttttcaagaacagtgcatcgatccatcctgcaaacccgcttttgttgatatacacgttcccgtcattagccagaacaccaccgccgggtgttttaagtggttgagatatgtttgccagtgttagaacaccagtcatcgcatcaccggatttattgactgcccctacttccgccggagtcggaggaagcgaagtatcataaattcttctccatccattagcatcacccgcactataagaccatgcaccaggagaacccgtcgcagcacgaatccatgttgatgttatatcatagtaagtctgaaccagagaaacaccactattcagagtacggcgatatgtggcaacctgaccgtaatatgttgtgtttccatatggaccgtccgttacgttaccacctaccgacagaacatcgttcttttcagtaaccgcagcagccccgaaactgtttccagacataccgcgaggaatacccgtgatataacgttcatcatggttagcccagtttgacggagttactgtattcgcagtaaccgcgccactaactgccattgatgtagcattcgttaagccgaggttagaagtcccgatcacacggaaagaaccctgttcaactgttacctgttgggtttgtgagtccagactcaacagcgtattttgagtaccatttttaaaggcacggatgtatattttattacctccgtctgtgcgagcgttcacgttaattgtacccgctaactgtccgccagaaataccgctgtatgcgttaatgtccatcaacccagattccacatcaggaaccgaagtaatatcagaacgacggaaaacaactgccggagcaacagcacttccagtgatcctgacccactggttagattgaatattgtttgcgatcaacaaaacgcctactgtcacgttttgactaaacgtagtattcttcgcaacagtaccgccgttaatcgtcgatagtgcgtttatatcctccgctgtcggacgatcgttttcggtgtatactctccagcctttatacgttaattgtccaccagagggcaatagaggaaggttagaagcactccagatacccgcaccacccagcgttgtacctaatttcaaatcagccataaaaatttctcctgtaatgactgtatttatgaaaaaggggctttcgcccctttatctcacgattgacagtttaacgtctttagcggataccgtaccgatgtttgtgttgtttggatgacgatataaaccgaaatcaaacgtaaccgcaccagcaggaataaccccttcgtttttatagaatgaatatacgttcgggatcgtaccaacatcacgcatgtggatccctgaaatatacttattattcgcgtcccagaactgcattacgatatatgcatctttattgttggcgattgcgtttgcatcgcgtttcatttggcattgcatacggatcgtatcaccagcttttaagccataactgcttagtgatgctttcgttaccgccgcttgctgggtagtagtccattctttgaactggtactccgctgtatttgtcgaagtgtattcaaccggatcagaaacaatataatcaagttcagcaaagttatgcgaaatgattttcttatcactgataaccccagtaggcgaaacaggcagagaaagcaatttatcaatcgggttttgggttccagcatcatcaacttcggaaagcgtttgcatcctgataccattgacaccaattgccgccccgttgcgatcggtttcgattcgtggaactttgctgatctggacattgcgacactgagcaagccccactttcacggtagacgggtagtgatataccatacagcccatcttcacgtttagcgcgtccgtagggatagtgaaatatcctgacagagaatgccattcatcaggagctaacccagtcgttcgcaggatcgtagaggatatccattgaccagaggcgttctgtgtccacatatagagataacattcgccgccagcattgcgaagttcttgtgagcaataaacatcaccagtgaacttgaagatgtcccccaagaaaacagtagaaccaatatcccacatcccgtataaatggaagccgtaagcactgccactgttctgatatacctgaacatcatcaaccattctttcaggaataccagttaccccgatatcactgaattcatcgaatacaacctcaacaaaactcgtcgtgttgtctttgagtccactaccagaaccacctacaaagttttccatacagatctttttcatcgtggatgaatagattgctgaataagatgaacgttgcgggttgtttgttgatgatgacggcgtgctaaagaatcgtgtttcaggccatgcaacagatccgattgtgcgcatataacttaaaaacgcatcagtcgattttattgcatcgaaagtatagaaacatacaattctgttcgctggaagtgaattcaggtagtctttaatcgcattcccgttcgtagtaggatcaccatacatatcaaatgatttgtaatccagtaaagccaaactcgtaccgtcaattacagcaaggttaatccctcgaccgcgctgtacgtttcggttaataatatcagccccattgatagatacctcaaccgagttgaccgcagaatcgttattcgttccacggacaacaaggcgatatttcacggcgtttgcttctgaaaacacattcgccgtgaaactatcagggccgaataacgccataaattcgttattcgccatttaaattattcctcccacacaaattcacaagtcttagttgctgggtttgcgaagattttcacgttaccgattttgatatagttacgtacaaccagagtatcgacggttgaacccgctaccgctaccgccccgatttctgctggagtcggtttacgacccgcatgatagatcaggtttccgttgatcatcgctttgttgtaatcggtgatattgatgttgaactcagtcaataccttatcgtcaatgccagttaagcgcattttctggacgttcccagagaaatcacccgcctgaacatgtgccgtaccgctcacactggtaaagcgtccacccgtaccgtttacgctaactgacagcgcaccagtcatagtatcacccgttacgttgacataggtactgtcaagatgctgggtaaagtttcgggtgttgatcacggttgcagtggttgtgccgccgtcattactgattgttacaccgttccaaccattagttgcagcggttcgtaattgtaccgtaggcgttgctgtacttgcaacaaacaaatcaccccccgtggtgatattagccagagctttaccattcagacgaatgttcgtaccgtaatacgccattgtgccgttaccgacatcacctactgtcagaacgtcaaccagatccgttgtacccgtcgccaggcgatacgtgcttgcctgaacagtttcatgccagatcgtatccgccacgccactacggaatgtacgaagcaagtttttggttcccgcagcctcaccactcagaacagtatttgcataaacagtgtttgctttcgcagactgattaatgttattgttcgtggttacggtgttgttaaccgttaccgcagcgttagccgtcagtgttccgttagtggttacgttaccaacgaagttgcttgtaccgttaaacgtgttatttccagttaccgtctggtttgcatcacgacgcatccagcttgcagcaaccacaccgcccagactcaaactattctgtgccgttgccattttcggtaagaagttttgcagagcaaagttcagaccgcgaggcgatacagcatagaaatcttcgagataatcgtcaacggcctgagtagaaccaaccagattatcaccgatgaaagtgtttgattgggtagtgataaacaccgcaccgcgtcgagttgtcgtcgcaccccacgccggatcagtaccgttcaagaactgcatggtagccggagtaattgctaggttagtagcagtacccgcacccgcttccgcgttagtcgcacaacgaataataccttcggcggtatccgtcgctttcttcgcttgcagttttttaggcgtgatcaccacgttatccagagtaccagcatcagtttcaccctgagtcgcaacacgtaaagtaccgcgctgtgtttcagtagcagacgcaatccccaggttaatcgttgtccagatagtgccggactgagttaaaccatcagcagttgcaaccgcaacatgactcgtaacgtcgaagaactctttcagcttaaccggaacaactgccttattcgttaccgtacctgctgcaacttccgcagtggtagcgagggcaataataccatcaagcgattcagtagccttgcgatcgttcagtttcttaggcgttacagcacggagatcatcagttcccgtgtttgtttctgtctgggttgcgatctcaatcaatccgatacgcgattcagtagacgttttacgatgcagcatttcaggagttactacgatcggcattgaagcagatccagcagcagcaccagttaccacttcgttttcagtcgccagaacaaccagaccttttgacttttcggtcgccgtcttctcgttcaatgatttcggggtgatcagatcaacaccgttattgaagttgtagacgttagtaccagcatccccacgtaaagccccctccgctgtcgtagcgcccgttgtaacgagtttcccgatacctgctagggtttcggtcgcgcggcgcgtgtcgagcttcttaggcgtgattgcggtagtgtcatcagtaccagcgtttgtttctgcctgggtagcgatttccagcaccccacgacgatcttctgttgctgatcgttcgttcagctttttaggcgtcacgatcacgtcatcaaggaaggttgctgtcgtgttctggttaacttccgcagttgttgccaggcgagcgataccacgacgcgtttcagtagcggttttattcgccagtgtacgcggggttactgccagttcatcagacggcgtatcttcatggttcttgtttacttctgcctgtgtagccagcgcaatcacacccagacgagaacggtttgttggatcgacacgttcaatgatcgggcgatactgtgcaactacccattctttcgtagctttcagatacgacaattccatgtatggaagatagtcagtatcggcattgaaagtcagagtgtcaacactgaaccaatcattaggcggataatccttacgctgtgggaactgcatcatgtttttgttggtgcggatcttttcaccggaaccatctttaactttgatcgtgcagttctgcgttttccccatcatgtacatactgatatatacgcgatcaccttctgcaacatcttgcggaagagtcagcgttacattacgtacagttggtgggttgccagcaatcggagtgatgaacacgtaatcgttaggcaacatgttcaggtcatcactgatacgacgcagacgaacgcgctgatcaccgtcataaacaacccaacggttattagcctgatcgaacatgaagataccataaccggaacgctgtgaagtcacagaggttacgttattgataccgtcatagctgatcgtgtgtccgctaccaggataaacttgcagagtcgcaacgttcaccgaagcaaggcgatccagatcgtaagttgtgattgagtcaccatcgtttgcgtagcgaggcaactgcaacgtaattttacccgttccactgttacggaatgttaccatacccgcttgcatttggaaagcggttaaaccagtcgcattaacaaactgcgaatcacggttatcacgcatttcagcaacacgccataagttgccgttaaaaataaacgcaacggtcatatatgggtgagtcagtcgataagagcttgactgaatatcacgtaaacggatctgacgagtgtttgaacgcactaacaggttgttgatccctgcaagaccgccaccatctttaatagtgataatatcaccctcaacaggggcatctggcagaatataggtcaattcagagaaacgaccgtcagccattaagtacgtaccggattcaacagggagaccgtcattgctcgttacgttgttatatacccattttggatcgttacgggttgagatccattttgtttcatcgaaagcacccgctggtgatggaatatctgcgcgagcgtaccaaatacgacgcgcgtacatgatagccataaacgcagcataaccacgggtagaatcgtattgttggatcgtgttaaattcgttaaaaaagtcaacgttcacgccgtcgctcaacacagagcgtgatgctttaccaacgttgataactttttcgccagcagcatcaaggccacttgtggcgcggaatgatttagctaccattatcgttttcctttatcttattcaatactgatatttataaacaaaaaaggcgaccatcaagtcgcctttttctcacggtaattgttcagccaatctttaacaatcgcgtgatgaagaggattcgcataatctaatttgtttcttttcttgtatggcgtaaaagcgtttttctctttgtccgtcatttggaaaagggtttgaaatgatttgcgttgccttttcgtttgaactgcttctgtggtttcgataatggcatcgggaaaatatttttccttcatgtatttcgctaaccgcatatcaggcacaaataaattaatctttcttttgctgttgttgtgtcggatatcagaacgagcgcataactgaaaggctggttcgtaatatttactgacaacataagcatcaactaattcttcctcttcaagcccagaggacaccgcaaccgctcgcaacatttgacgaagccagggtaacgggttgtaactgaataatgccaccacgttagtataacttgaatagaagttcaatccgtgcgagttatacgggatttcctgcccctcgctaaacttcgatctgtatgtgttggtgcaatagatgaactgttcgccccctaaaagcgcctccacgcgttttttaatctgggtgtatattgtcgtcccagattgagagagatcgcccgtataacgcgaataatccccctctgcgagcacatgtattttaatgcgcttcgtgtttttatattgcttaaagtcaaccagcgtttgaagcggtgaatctttgaactcaacatcatgaaacgtttgtaagatcttccctgtaatcgtatctttgatgttggatgaagcaatggttacatttttgaacttccactggcttacgtcatgatcctctacgaagtaacagacatatcccgaatcgctacattgcatcttcaccggaatagcccctaacagagcacggtaaagcgggaacatcttcattgcgatatcatcacgtttacgaagcccatcataggctaatcgtgtaaccagttctcgtttttcttcgtcaagttttaaatcaacgatatcatcggcattgcaactaaacggcaagcaaatctcgcgtatgtgcttgatattgctattaaatcgcagactttcgaacgcaaccaaatcaggaacttcgtcaatgtacagggaaaaatccttatacaaatcaaagtcatcaatgtttttgagtgctgcatgagtgataaagatcacatcataatctttgacaacctcacgcagcgcgtcattgttggttcttttggttcggtgatccgtgtcaacaatcaccgctcgtttcccttttacctggttgatgtagtagtcataagactgttttgataacatcatggaaatcgaagcgatgattgctttttcgcccgtttgattgatatggttcagaatcgcctttgttttaccgcttgacggaacacattcaatcgtattaaagatcatttattcttagcgtatttcttctggtatttcttgattgcttcgtcggtgatctgtttaggcatttgacgtgctttcttcggtttcagtggttcgacaccgaagatttcaacgccgtaatgtttcagtatcattgcaacgatttcctgacgaatgaagttgcggctaaccttttcagggaattgatctttaatctgcttatgaagacgatcttcgagcgcgtccaggtgagtaggagtgatgatcgcggtattatcgcgatcaacgaatttctccatgtattccatcgtttcagcatgaacagcatttgcagcagggagtaaaatttcacggctcatttaatcaccaataagttgtttcagttgcagataaccgccgataagtttgttatcgacaaaaatacgcgggtattgaaacgctaaactacgttgccttacccgttttgctaactcttcgatacgtgggcgatcgtattcaaagcccagatcgtttttcgcttctttcagaacgggataaaatgtatattctatccctttttctgtcaacagcttttgcgcttgtatacacccgtaacagttatgaagactttcgggaattccgtagatttcgactttcattcttctttccgtatggtttgagatcctgcaaaatacgctttttctctttgcctaacagtttttcgatattctcaacagcggttaactgagtgtgcagatcgaacaggtttgcaatctggtcttcctgcattttcagttcagattccatgttgatttgatagatgctaccaccactgaaaacatgttgcaaggcgaaacgaagcattgcatcagatttacgtactggcatcggtgcgatgctcaacgtttccaggttagccccgaatgatggatcgatgcggagatcgcgcataggattttcctgtacagggcgatacgtgaatttagggatctccatcagacgcagatccgatccggcaacaccagcggaaacctcttccggcgtagcgatatgcataacgttttcagcctctacacctttactcagattaacttcttctggttcttctgaggtgaattcaccattttccggcgttacttccttgaaccatttccatagtgatgcagggagttcatattcgtaaccaccgtccatgataaacgcgcggtcttcgaactcaccgatcgaggtgcgatcaatcgtcacgtaacctttttcacgaatgatgtttgcgatacctgttttccaggttttctctgcaaagatttcaggggatacggttaaaccgtaagtttttccagcgaataattccatgattacctcaaataaaaaaaggggatgccgtaagcacccccgaattatattacttacttgccagcaatgcaagttttgcggcggcttcacgaactgcgcgagctttctgcgcaacaacttcgatcgctttctggtgttctgtcagtgcgtcttctaccgcctgtgcagcttcgatgatctctttgtcgcgttgctgtttggcaatatcaacggtctgaaccgctggggtatctgcctgaactgtgccagtaccgagttcacggaagaacttacgctcacgatgcataatatacgggagagtacgatctagtgtgatggatgcatcaccgtcgccgtcaacagactcaagcaccataacaccgttgttgtttttgatgtgttgcacaatgcgtttgttcgcggtatgagagcgcaggaaaccagcttcatctaccagaacatacggacgaccagcaacgaaatgtgtaggcatcgcttcaatatctgctggttgtggcacagcaggttttgtaactggttcggttgtcgctggagcgaggttaacaccaccatccagttcagaatccagatctggtttcactggcgcaggagaaacggacggtttgcctactggttttggctttttagcgcgttttggcgctggagctttagccggagcaacttctgtgaagtatttcgcttcccatgcacgaagggtaaacattgcaacaccgaccggagcgtcaaaggtgtaggtgtcaccgttacggcttgtgatggttacaacaccatccagatgtttgttgatctgtttcgcctgtacgctattggcggtgtttttgccgttattggtgaaaccttcgacatcaaccagcttgtattttttgccgttttcgaagcgggtttctttggttctcaccgtccacggatgtgagccgcttcctttggtgatgtttttcagcgggatcgaccacttccagcaatagtcacgggcttctttacgggttttgaaattcagaatcatgatattatctctcaattgggttaaatttatgctacgtggatatcttaacagaactacaaaccaggtcaagcgatatttttaatttcgatggaattctttttgaactcaatcattcgctgattatccgaaccgcgaaacggtttcttagtcggtagatccttttcgtaccgtccatcgatcagaacatcaatgaatggtaacagcttagagcgttctgtatcgccctgtaaggcttcgagggtgtaacccgtccaaacccacacatctttatcagggaacgtcgcacggacgcgctggagcagttttaagagcgttggatgattggtgcggtaaaacggatcgccgcctgtaagcgtcaacccgtccacatggggatttgaaaggagtttaatcaactcgttttcagtctcttcggtgtatggtgtaccgttgcggggattccatgttgatttgttgtagcaaccttcgcatttatgattgcagccagtgacaaacaacactacacggattcctttaccgttgaccatatccatgttgtagatgcggtcaaagttcatcagccttttgcccctgggaacaggttgttcagcgcctgtgtgtctaatttcagttgaatcattttatagtgcctttcttctcaaggatcagttctttgatccgttccacgattacggcgtattcccagttggctaacttctgggtatcacaccactgttgaaaatccttcattgcttttacgtgaccttctttccagtaagtcaccgcgatttcgttgcaaagattttcagtagcagtatttttgattttcatgatttagcccctatagtttgttgtctacaggggcatattataacatcattcgtcgtccgtcaactcttttttgaatccgacataataagcatcagatccattccatgtggaggcgttaacgctacccaacagaacacgacaaggcatatgtttaagcgcagactctacaacctgggatactgaatccagcggattgctaccagacacccagcggagcagatgacgatcatcaccgttaatcggatcaacgaattcaaatctgataccgttttcaatcagttcgtgcagaagaaagtttatcgctttgcactgcgctttgttaatcagcataaatcacctaccagatctttatcaattttggtgtatgtgagcgccggatcatacttctccagcacgttctttttgcacgaatggatgaacttttccatcgcacgggctttcatcaatactttgaaatcttcaccaaagcattgtttgattgtgggaattgcacgagccgctttgtcacaatcaatgatcagtttgtactcgccttgtgtcgtgacaaccaccattgagatcagaacacaaccatcaaatcctttttcattgattttatggaagttcagcttatccgtagtgcttgccaggttcgcataacgatccccgcgaatgttgcccggagaactataccgagaaacgttgattgaaggaatacgaatatcttcaacgatatcgcacgacgcaacagcttcaacgaaatcgagaattctggtcgctttgatgacgtgcgccttaaacgaaccgacttctaactcatattcatctttccagcctgaatagtagtcaaccgcagggctaatcgctttcatgagcgcttcgggaatgtcaatgtgccatagctgttctgcgtactgtttgcgccagtctggataagttttacgtgctggtttgaatgcactgttgccgtcttcgaacatcatttcacttttcctctctttttcgtaaatgtcgtacacacttcttcgttcgtaagcgtcttttaggttgctgtttactatactatcatgcgtcagttcttcgcaatactttttatcccattcagaacacgcatgatcaaccatttcctgaaaaactcgctgtggaacattcccatctacaagaatcctcaataagcgatcagtatcatcattcggtaaagtatgaaagtttttaggaagtttaacatagaagtttctcgcacgagaaatcaaccattcttcaccgcgatcacgttcaatagtgtaatcgtacatagcaaaaaaggggctttcgccccttcctcttatttcgcgttcagggagtcgatgtaagcgctaacgtcagcggaggttacagaagcggcatttttgccacccagcaacacatcaatcttcgtcacgatggtatcgacgcttacggaggtgtggcctacagcggcgatcacgtcttccggtacagtcagacccagactttcggtttgcttgttcagttcgatgatctccaggttgattttgacatcagccagtttgcgatccagttcgacgacagagagatcaatctctttgttcatcccttccagttcttcgatcttcgtctgcaagccctgccagatgttacggtgttgcagcgccagaacataatgactgttggacacttcctgccccgccgccagcagttttttgatctcagactctttaccactgtgaaggtctttgtgttctttgactttctttttcaacttcacgatttcctgaacagcagaaacgcgagtatgttgcagacggtcgatctctttgatcaggatacgtgcagcactgcgccaggcttcttctggggaagtgttttgttcaattgcagtttcaactttaccagtcacgaatgctacgattttcttgaacataattttaccttatttgatttcaaattgattggtgaaccattcaggggctttaacaactttcccctctctgatataaccgattttacacagttcgttggtcaagtcaagtctttttccacccgccatataaaattttaatctgcttactgggatcaccggacggataacgtcgcgatagccgaaatgcgcactacgcaccactatagagagcatacgcaaacggttgatacatccggtatacgaac

SEQ ID NO: 40 - DNA, 179471 bp, Unknown
  source: /note="Description of Unknown: KP2M-M0112 Bacteriophage sequence"
attatattctccaaattgaatacattcattatagccgattgaatcaggtgtttcaaacctacttccaatctatattatttaataaaatcagcgcgaagcgcttccgtgagcgaagcgaaacggatagttaaactggttaaaaagtatacggaaatgtactgttttctctatatataaaatataaaaatattaaaacgtacattcagtacatagacactcactacgttcgtgtccttcgcttcgctcagatttttgaaatgatctattgactttgaaaaagtgatcactataatcagtttcattcaacaacaacgaggtattgaaatgtcttcatttgcaagtatgttcaacctgaacagcttaatgagcaatgacgatgatcctgttgatgtgatgtgtatagatatttcaaacctttcggtagcaacgttgatgaacaacttcaagccgaaagaccagaatgacatcaaccaacaaattgttcgtcacatagtgcttgacaccattcgtcacaatgtggttaaattcaaaggcgagtaccctgaaattgttctagcctttgatgataacaagtattggcgcagaagtaaagcctggtactacaaaaagaaacgaaaaatggaacaagaagcatcggattgggactgggatcgcctgaatggtttccttcacccgacatacgatgaaatccgtgctaatttaccgtacaaaggtatccgtgttgacttcgcagaagccgatgacgtgatcggtgtggtgacgcgtaaagcggtatccgaaggtaaacgtgtcctgatcgtttctgctgatggtgactttgcagcccttcaaaaatatcagggtgtgcgtcagtggtcgccaacccaaaagaaatgggttacaccgaaatatggttcacctcgtaacgatttgcgcatgaagatcatcaagggcgataaaaaagatagtatcgcttgcattaaaatgcgaaatgactatattgttacgaaggttgaaggagaacgcgccccacaaatcagggctgctgaactcgaagcctggctggaagcggacgatccgaccgtgggtatgcccgaagagtgggcgatccgttacagagaaaacgaagaacttcgcgactttgattttattccgaaagatgttgcaacggcaatcgaagaagcgtacaatgctccaaaaatcgggaacaaagcaaaaatggagaaatacttcatggaatgcaaacttacccgtatgtatgaaaaactaagtgacttttgaggtaacaaaatgagtgtagaattactgcaagaaaacccagacatcgctaaagcggttaaagaactgatcaaagaagcgtcgaacgtgaaaacccagatcgaacacttccagggttctttcaaagacatcaaatccaaagcgaaaacggattatggtatcgacggtaaaaccttcggcaagctgttcaaactgtatcacgaacaggcacgtaccgcgttcgaagaacagaacaacgaacttatcgaactgtacgatgtgatcgataaggcgtaatatgagcgaaatcggaaacaaaaccgaagtcggcttgtatatcgaaaatctggttgcctctgagggggcaacctacatggaagctacgttacaatggatggacgaaaacagcattgattatgctatgctgtccaaaaccgtaccgaaagcgatcatcgacaagattagcgacgaagccattaaaaacaatctgctgcgtccttctgtggctaaagaccacgcgacgacgcaaacactggatgatttcatgtgaaatttaaaaccccgtttgacagttcagacgctaattcccgtttgaaaccgatcgcggtatacaaactgtatctggtgatgaaaaatcactttgctgggaagtatgacgcgatcaagtacaaatgggaaataaagatcactgaaaaagcgttcgaaaagagaagagataagtattttttcaaaaagttagccgaaaggtttacattcaaagaaatatatcttatacttctctccaacatggtagctaaccccgacttctgggtcggggatgtagacgaagatacgatcgtgttttatcgtcaatacataggcaagttgaggcgaattgataatattttcgtggacgatgtaaaaaacctgtatgaattttcccgcatgaaaggtattcccctctcaacggtgtttcagtatagcgtcaaatcatcaacctcgtatatcagcaaactcgtacagtctggggtgatttcttatgaatcattcttgatcctcgactcgtttttagacatcataaataaacacgatgaaatcgcaacggatttcgtctggaatgaatttagtaaaaaactaaacgcatacagaaaattagttgaaatcagtaacgaagaaatcgtaaaataccgaaacttaatgaaacaaactttaattaacttaaacgagaaataacatatgtcattctttaaacgtcaagatccaaccaaactgcaagaacaagtcgccgctctgaaaggttcatccggcttccagaaagatgaaaaagagtggaaactcggtgtcgatgcacagaaaaacggttctgcggtgatccgcttcctgcctaaccgatctgatgatgaactggcgttcgtgcgtatcgtcaaccattcattcaaaaagaataaccagtggttcatcgaaaactgcccgtctactcacggcgattacgatgcttgccctgtgtgtcagtatatctctgaaaacgatctgttcgaaaaagcgaaagtgaaaggcagtgaagccgaaaaaacactgggtatgatcggacgtaaacaatcgttctgggcgaacattctggtggttaaagatccaatgcacccagaaaacgaaggtaaggtgtttaagttccgcttcggtaaaaagatcatggataaaatcactgcggctatcgcggggaacccagatctggatgaaccaggtgttgctgtgacctgtccgtttggtggcgctaacttcaccctgaccgcgaagaaagtaggcgactggcctaactacgacgacagcaagtttggtgttcctggcccaatcaaaggcatcgaagacgaagcgcgtcagaaagaaatctttgaaggtatgagcgatctgcgtccaatcactgctccagaccagttcaaaccaactgcggaactgaccgcgaagttcaccaaagtattcggtggtgctgcaatgggtgctggcgcaagcgctggtgcggatctggattcagaactgaactcatttgacaacgaactgaaaaacttcgataatggcaaccattccaacggtgctaaagaatctggtggcgtaagtcaactgaacgtaggcggaagcgtaccggaagatgataatacacctccgtttgacctggaaggtggttccggtgatgacgacctggataaactgctggatctgtaatgcttacgggggcgaaagcccccaatttgaaagtttgaggtagatatgaatttagaacaaaacgtatatgtagcgcatctgaacaacgttcgcaaatcctgggtaggtaaagtgccggaaaacatcaaagagattttccgtgcgatgcctcaagctgaacgctttgagcattacaaacggatcgacgaagcagtaagcgcagtacataccggactgattcacgacgctcgcgaagcgggtacgaaaatcacagaatccaaaagcaaagaattccttgacaatgcggcggatcgcgttgtagaatccctgattaacggcacttttgcctaattgaaaactataggttgaatatgaaattctctaaacaaacgatcgatatcctgaaaaacttttcccagatcaacccgtctgtaatgctgaaaaagggttcgttcattatgacgaaatccatcaacagcgtagtttacgcagaagcaacgatttctgacgtaattgacgaagatgtaggtatctacgatctgaactcattcctgaacatgctgaacgttgtaggcactgatgccgaagtaactcacgatctgtccactggcgaaatcgtcattcgtggtgagaaaatgaaaatcgttgagcgttcaagcgatccaaccacaatcgtacagcctaagaagcgtctggaaatgccagttgcggatctgattttccagattagcgcgaacgatttcgaaaaactgatcaaagcgtcacgcatgatgaaactgaccgacctgtctgttgagccaatcaacggcaagctggtaatcaccgcgaaaagtaaagaaagccagtcaaccttctctgtagaagtgggcgattacgaaggtgataacatgttcaacttcgatatgaagattgacaacatgcagttcatcaacagcgattacaaagttgaaatctcttctcgcggcgctgcgaaattctcgtccgaaaacggcgttgcgtatgtagtggtacttgaagcaaccagccagttcaagtaagataaacaaagtagtacacaaggggcgttaagcccctttttgataatcaattgaaggtaatattatggaacttagtgaaaacgtacagttaatcgaaaccaaatacggcaaaatctcccagtctcccgaagaattcgcatgggatcagcgctatcgcccgacgacgatcgatgaatgcattctccctgctgctgataaagcgacgatgcgcggcttcatcaagtctgggcgcatcgacaacatgactctggtttctgattccccaggtacgggtaaaacaacgctggcgctggttctggctaacgaagttgatgcggaagtgatgtttgtcaacggttccgattgtggtgtgaacttcatccgtaacgaactggatcgttacgcgtcctctatgacgcagaagaaaggcggtaaaatcattctgattgacgaattcgatcgccctggcatggcagaagcacagaagcacatgcgtagctttatcgaagcgtacagcaagaacgttactgttatcattaccgcgaacaacatcaacgggattcaccctgcgctgatctcccgctgtccggtagtcaagttcggttccccgtcgaaggaagaacgcgttgaactgatgaagcaaatgatcaaacgttgtttcggtatcctcgaaatcgagaaaatcgaatatgaccagcaggtgatcgccggattcgttaagaagcactacccagacgcgcgatccatcgttaaagctcttgggttctattctaagcgtggcaaaattgatgctggtattctgtctgagattgttggttcggacatcacaccagtgattgaggggcttaaagcgaagaacttcaaagcactgcgagccgaagcaatcaagtacgcgcctgagtatgaaactttcctggctaaacttctggatgcggtatacccgatcgtcaccaacgaatctaaggttgcactcattcaggcagtaggcgaaaacaacgcacagtacgggctggcagtgaacaaagagattcacctgcaatacctgttcatgggcttaatgcttaccctcgcgtgggaggcttaaaatgtcactggctgcttttctcgatgaagaagaactgaacgaacatgaagcggcctggcgttctaaagactgggacaagatcgaagaacttgtgaaagagtacaccaaagacaaggaaaacaccttgtttatggtgctcgaagaactgaacaacgggaagacaccattacggatctctgcccttgattcatacgataagtttttcatcgacaatgcaatgagccagcatatcgaaacgctgatacctgcatacacgatgaatatgatcggttccggtttaccagaccaggcgcactttgattattacctgcatacggtgcgcaaaggtaagcggttcggggcgtgggctaaactcaccgaagataacgaaatgaaagttatccttcatgttctccaaaaacgatacggtgtaaatacacgtatagcaatggaatattacgaagaactcaaacagcttgaaaaactggacgagtggaagcggaaaaatatgaaagttgctttatctgtgttggctgatgttgtgaaaaataaaaccgaccagaaaaaggttgaacaactaataaagaaatggtgatgtatgaacatgctcgaaattaaactgtccagcgatgacagtttcctgaaaattcgcgaaacgctgacccgtatcgggatcgcaaataacaaaaagaaaatgctgtggcagtcttgccacatcctacagaaacaagggcgttattttatcgtacacttcaaagaactgttgaagctggacggtcgccaggttgacatgaccgaagatgacgaactgcgccgcaataacattgcgcgacttctggaagagtggggtatggtttccatccttacgccggatctgaaattctccgaagagaacaacttccgcgtattgactcacgcacaaaaagctgaatggactttgaaatacaagtaccggatcggacattaatcaaaagcccttgcagaaatgcaggggctttgttatattggttgtacaccacttgtgaggactaaattatgaaaattcgtattgaagaaatcatcaaagctattgaatccggtgatcatttgatcaaccgtctgcatagcgaagacatcaaactgtctcttacttgcaatctctctgatctgcgcacctacgcatacgcgcgggatcacttccctaagttctatacccgcatcatggaagaatataccgtgctggttgaacaactaaatcggcctgacacccaacgctatcacaaattagcgcaacgctcgcttgatctgatcaagctggctggggtatcattcctgtcacgattaaacacggagaaagaaaaccgtaatgaatgaattttatctatccgttgagcaaatgggcgatcacatctacgagcgcttcattgactctgagggacgcgaacaggttcgcaaaacaaaatatgcgcctacaatgtttcaacacgctatggcgggtgtagactcgccatatcgcgacatttacggcaagacctgcatcaaaaagaacttcgaaagcatcaaggaagcaaaaaactggatgcagcgaatgaaagatgtaggcatggaagcgctaggcatggatgatttcaggctggcgtatatctccgattcctacagaaaggaaatcgaatacgatcgcgacaagatccgcattgcttcacttgatatcgaagttaccgcgcctgaattccctgatccacgcgaagcaaaatacgctatcgacgcaatcacccactatgacagcgttgaagataaattctttgtgtacgatcttgtcgagggtggtttagatgaatgggtagcgtcaaaagttgataccgaaaacgagatcagcgaagaagacttgaagaaaattgtttaccgttcattccagaccgaaaagtcgctgatgtcggcttatatcaaagactggaaagagcggacacctgttattgttacgggatggaactcaaacaagttcgatatcgcgtatatcatcacccgttacctgaatatcttcgggcaaaacgttgttcgtcatttcagcccgttcgggaaagtgactgcgaagacaacaaccgaccattacgggaacgaacaactgggctatgagatttacggcgttgctcaaatggatggaatggatctctataagaaattcagtttcaccccgcaaccaacttacgctctgggcgcgatcgctgagttcgaaacaggtaaaagcaaagttgattacgaaggttcgctgtctgaactgcgtcaagcggatcaccagaaatacatcacgtataacatcgttgacgttatccgcgtgttggatatcgacggtaaacgcaactttatcgaactggttctgtctgtagcatactacgcgaaaatcaatttccctggggttatgtcaccgcttaaaacgtgggacgcaatcatttacaactctctgcgtgaagagaagaaagtaatcccagaaaacaaacgccatactaaaacgccgtatgatggtgcatacgttaaagatcctgttgtcgctccataccgttacattgtatcgttcgacttgaccagtctgtatccatctatcatccgacaggtgaatataagccctgagacaatcgctaacagctttgcagtgcgtccgatgcatgaatacatcaataagactgcgccgcgtcctagcgacgaatttagctgctctcctaacgggtggatgttccgacgcgatgttaaaggcgtgattccggtcgagatcaagaaagtatttgatcagcgtaagacgtggaaaaaacgaatgatggcgggtgagcgaaatctcgaactgattaagcacgaactcgaacacctgacagacgcgcacaaccaaatgatcaaccctgatttcgagttctacgaagatttcggtgatgaatcaaaagctgtactgaaaacgctgtctaagcaaatgcttaaagccgtgaagaaagtgtgtgagaagaaaatcgcacaggcgaacaccgcacagcttaaccgtaaaatcagtatcaactccctttatggtgcgttgggtaacgaacatttccgttacttcgatattcgaaacgccagtgcgatcaccatgttcgggcagttggctattcagtggattgagcgtaaggttaacgaataccttaacgaactgtgcaacaccacggattacgcatacgtgcgttactgtgacaccgactccatttatgtttgtatggacaacgtgatcgcgaaagtcggcggtgaaaataagttcagggataacaaccattgggttgacttcctggataagttcagtaaagaacgcatggaacctatcattgataagggctaccgcgaactgtgtgagtacatgaacaacgtcgaacacctgatgtttatggatcgcgaaatcatttctggaccacctctgggatcgaaaggcctgggtagtttctggacggctaagaaacgatatgcggctaacgtatgggactccgaaggaacccgctacgagaaacctaaattaaagatcatgggaatggaaacccagcgaagtagtacaccgacagcggttaaaaagttcttgaaagaagcgatccgtcgcatcctgcaagaaggtgaagaatccttacacgaacacttcaaagtatttgaagaagagtataaggcgcttgactaccgcgaaatagctggtgtatcatctgctaataatatctcaaaatataatgatggtgctggcttcccaatcaaagggacaccaaaccacatcaaaggcgttctgttctttaaccgccatacgaagggtattcaaggaatcaccccgatcatggaaggtgaaaaggtgatggttctgccgttgcgagataaaaacccgtggcaagctgattgcatcgcatggcaatccggtacgcgtttaccaactgagatcgaagaagatattttgaagtgggtagactacggcggattatttgaaaaacatgtgattagcccgttgcaaaacatcacggaagcatgtaaaattgattacgaaaaacgcgcatccctgaacactctgtttggtgatgactggtaagacctgacggggcagaaatgccccatttatataaatttgtgaggaaaatattatgcgtgtatataaaccggaaaaataaatgtctaataaagcactcctgaaaaaactgatcaaaaactcgaatagtcaatctgcgtcaattctgtctgaaagcgatgttttcaataacatcaccaaaactcgaactcgtgtaccgatcctgaacctggcgctgtccggcgctttcgatggtggtctgacttccggcttaactctgtttgctggcccgtcaaaacactttaaatcgaatctggggctggtgacggttgcggcgtacctcaaagcgaatgaggatgctgtgtgtctgttctatgattcagagaaaggcgtaactaagtcttacctgaaatcaatgggcgttgaccccgatcgtgtggtgtatactcgtatcacgacagttgagcaacttcgaaatgacgttgtaagccagcttaacgcgctggaacgcggcgacaaagtgatcattttcgtggactctgtaggcaacaccgcgagtaaaaaagaactggctgatgccctgtctgacaacgacaaacaggacatgacccgcgctaaagcacttaaaggtatgttccgtatggttacgccttacctggcggatctggatattccgatggtgtgtatctgtcacacatacgacacacaagaaatgtacagtaagaaagtcatttccggtggtactggtctgatgtattccgcagataccgcgatcatcctgggcaaacagcaggtgaaagaaggtacggaagttgtcggttatgacttcatcatgaacatcgagaaatctcgcttcgtgaaagagaaatccaaattcccgcttcatgttacctatgagggcggtatcagtatgttctctggtcttctggatctggctatggaaatgaacttcgttcagactccaacgaaaggctggcgcggtcgtgcgttcctgaacacggaaacgggcgaacttgaactggaagaaaagaaatggcgtgaatcggaaaccaactcgatcgagttctggaaacctctgttcactcaccagccattccttgatgccattcaggataagtaccgtattcctgacaaagagatcactgacggggcagcactcgaagatctttattccgacgatgtagtagaaccgtcaaataaatttgatctcgatgacgatatccctgatgatgtggatatgtcagaagagtaataaacaactgggggctttgcccccttttaataggtgaatcatggacattgaacaaaaaacaaaaaacattcttgatgaagcaatgcaggacgttattcaagaactgttgatcaacgatgaaaacgatgttgcacacttagtgtacatccataaggtgtattgggataacggcctgaaagtcgaatttagtacgccggacgaagacaaagaaaaactgattccgctggttcacgatgcaatctacgcgcagatcaagcccaatctcccaaagcctgaaaagaccttatgggcggcgttgaaagtaaagctgtataatttctttcagatgttcgctaatctggtttaagaggtaataatgatcgtcgaaacaatattttcaaatctggtttttaatggtacgtattttgttcaggcgtggccccatttacgccgtgaatatttcgaagggaacgcgcagattctctttgatttgatggataagcacgtacaggaattcaacagcattccttcacaaactgctttagaagtagctctggacaaaaagagcctgagtgatgtagtctacgaagataccaaaaagatgatccgcagcatgaaaaatgcgccggaagatctggaatggttgatgaaagaaacggaaacctattgtcgtgacaaggcaatgtatcgcgctctgtcccgtgcaattgagatccaggcgaatgctgaaaaacctgctggcgaacgcaacaacaaaatccctgacgttggggcaatccctgacatcatggcggaagcgttagcgattagcttcgatagttcggtcggtcatgattacttcgaagactatgaaaaacgctggatgctttaccagtccaaagcgatgaagattgctttcaatatcccgatcctgaacgccattaccaaaggcggcgcagaacgtggaacattgaacatcttaatggctggtgttaacgttggtaaatctctggggctttgttctctcgctgctgattacctgcaatcaggtaaaaacgtcctgtatatcagtatggaaatggctgaacacgtttgttctaaacgtattgacgctaacctgcttgatgtgccactggacgatatcgacaacgggaacatcacctatgcggactataagaaccgtatggaacgcctcaaacagtcgaaggtcgggcgtttaatcgttaagcaatacccaacagcaggggcgaacgctaaccacttcaaagcgctgattaaagagcttaaattgaagaagggtttcgtacctgatgtgattattgttgactacctggggatctgtgcttctacccgtgtacgcggggcggaaaacacatacatcctggttaaagcgattgccgaagaacttcgcggtttggctgttgaaacaaataccgtaatgtggactggtgcgcagactacccgcgccgcgtgggatgcttctgatatcagtatgggcgacgttgccgaatctgctggtcttccagcaaccgctgactttatgttagctgtgattgagaccgacgagttagctgatcagggcttgcagttgttcaagcagatcaaatcccgttacggcgataagaaccactttaaccacttcaaactcgaagtgcgtaagggtaatcaacgctggatggataccgacaacagcgatatcgggttcaaatctgattataaaggtcgtcagatgccgaaaacgcttgaagaagcacaaggtgctatggtaaaacaagctgaaactaaccgaagcagtaagttagccgaagtagcaaacagcacagacattcaattttaacggggcttcggccccctccaaaggtatagtgaaatgaaaaagattctcgttattgtgttcctgatcctcctgtctctgaaactggcagcaatcggggttatggcaaatgcttcctggtggcttgtgtttgcacctctgatcgtgatcggtgtgattaagctggctttctgggtgctgtttgtggtggcaatggcaaatgtattccctaaactgactctctggattgcaaaaaacgcaaaataatcctgattaggggttgacgggagttatgattgtgataatatgactcccgtagacaacgaaacggattaaaggagataccaaatgaacttactgaacaacccatacgacgaagtgatgaacccagaactggatttcagcgcgggttatttcgatgcagtagtgaacagcgtagtaaacagaggtttgctggttgaaatgctgaaaagtgggaaagcagatgttgaaggtagcgttgatttcctctggggcttcctcccaatcgacccagaattcaaactctgctgtaacgaagttcaggccaaaaacgttcttcggtatctaatcaacaaagcataaaattaagccccgaaaggggcttttttgtatctgtaggtattgcaatccttctcgaaaggtgataccttattctaaacaaacaaaggaggacatcatgaaacttgcaatcgcttttatcttactggttctaaacgcacttatgggctttccgttcccgtggttagtgcttctggctatcccgtttgcatggaacctgttcagaatcggtttagcgggttgtgttggtgtcctgatgcttatcatcggcgctatcggtggcaaagacgcttttatcggtgttctgaaagccatgaaagagggcgttaaagaaggtttagtgaaatgagtgatttattagatatgatacttccagacgaagaaccggagttcgatagtccgtatcgttccgaatggatcgtatcggttgatgataaaggctatgtcgatatcatgcgctggcctaatattcatcctggctatctggacgaaggtatcaatgcggaaatgctgggtatgcctgaacaggttgaagatcctgctggggtgtataagtggatttgcagcccgtgggaaacccgcgactgggaaagcaatattgttgatgactggggctttgatgtggtagaatctacccctctgttcttattaccggaaaaggtcaatggcgaagttaacgaaagcggaaaccaaacaacacaacaagataatggatctggtggagtctgacaaggcgctaacctacgacgaaaaattattcattatcgaaaacttccatgaaggtgcatttacgaataactctgaactgggtgcattctttaccccgatcggacttgctcgcgatttcaccattgatgcttgtaccagtggaagcgttgttgacctgtgcgcgggtatcggtgggctatccttcgcgatgcttcatatgatgatgtacgccaaaccgcgtgaaatcgtctgtgtggagttaaaccatacatactataagttgggtaagcgtatcgtaccggaagcgacctggattaacgcagacgcgttaacgacggagtttgatactatgtttgatatggcgatcagcaatccgcctttcggcaagataaagacatccgattttaagggtaagtatacgggcgcggaatttgaatataaagtgattgaacgtgcttcacagattgcccgtgcgggtacgttcattctcccgcagatgtccgcgaatttccgttactctggacggcgttatttccaacaggacgaatcaacgacaacatcgaaatgcaaaaagtttcttgatgaaactggccttgaaatgcaaccaggttgtggcattgataccggatactatctggaagaatggaaaggcgtgaaaccgatgtgtgaagttgtctgtatggaattccctgaaccggaaccagaacccgcgcaaaaccttttcactttcacaatagagtaaagactatgagcgatcaattaatcaaaaacatggatttaacctacagtgtgcgaatgattcgcctactgaaaaagccctggactgaatggacggcttacaagctgggtatcatcgacggtcaaggggaagtattgaaaaacccgaagacgaaggaagaactggaagcatattccccgttccatcgctctgtaagacatatcaagcgccgtttaaacgcggttccttatatgtctgggttcatgaaccttacaagcgcgtatgactctctacggaaccgttggaatctgaccgagcaagaacacgaagagatcatgatgaacctcccagaacttcgcgaaagactcaacgaagaaatggttgcaggtgattcaggcggaagcgtggataacattgcttcgggtgtgactacaggcgcgatcacgaacaaagggccaaaggttctgggttctacgcgtccatataaacgcaaacgtaaaatcatgaagagtgaagaatgaaaccattaccgcctttgaattaccggatctgggttactgcgaacaattacacctggtttccgatccgtatcaagtacatgagcgacaccgcgatcgtgtacacgaacgaaagaaaaacttcatcgggtgtcgatattcctagaccttatccgttttataagatattctatgaatggaaaatcactttagacggcacagagaaagaagttagccgatagaggtaaacatgtatcttgatatagagttcgcaactcgtatcatgggatcattaccacaaagcgaaatcgttcgacggggtggagaattcagtatccattcccgttgtccgatttgtggcgactccatgaaggataagcacaaaaaacgtttctggatatttccgtcaaaacgaggcacacatatgatgtgtggttgttttaactgcaactacagcaagccgttttctgtgtttctgaaagactattacccggatgattatacggcgtatttgatggaatctttcaaggatcgtaaagatttaaaacagacgcacgaagaaccgccgaaggaagaaaagaaatatattcctgaattgcagttctgcgaacgtctggacacgttgccagaaaatcaccctatcgttaagtatgttgcaggtcgtcacatacctaaagacaaatatgatcgcctctggtttacgcgtcaatggcaacacctggttaactctgtgaatgcggacgcataccctttaccgaaggatgaaccacgtttggtgatccctatctttgatgaaaagggtaaaatcgagtcattccagggacgcgccttgcgtgacaatgccaacgcaaaatacatgacaatcaaagcatgtgaacactcaacgaaagtgtatggtcaagataccatcgatccgttgaaacctgtctacctgcttgaagggccgctggatagcctgtttgtagataatgctggtgcgattacgggcggacaaatggcgctgtccgatgttccgtataaaaatatgcgtgtctgggtgcttgacaatgaacgacatcatccagatactaccgcaaggttaaaaaaattgattgatgctggagaaaaggtcgttttatgggataaatgcccctggccgtcaaaagatatcaacgaaatgattaaaagtgatggtgctaccaaagcagacattgctaagtatctgaaagaaaatacagtgtccggtttaactgcaaagttgagattcaaccaatgggatcgaagtccgaaaaagaaatagatggtataaaggatcttctgactaaggttagaatagattacaataccggaaaggtttactggcttaaaaatggtatggaagctgggacaaaaaccaaaaagggatatacccgcatcgaaacaaaaggtgtgaaatatatgcgtcatcgtgttatattttactcgcgttttgggtatctccctgatatgattgaccatatcaaaggcgttgatgttggtgactttcctgataacttgcgtccagcaagtacagcggaaaacaatgcaaatcacattaacaaacgtaaaaacaacacaagcggttccattggtgtataccctcgcggaaaccgattttctgcaagtattcaatataagggcaaacgaaaacatttgggttcttttgcaactgttgaagaagcacaagccgcttacaatgatgccgcaaaagagattttcggcaattttcataatgaagagacaaataaatgactgataaaactcctgtttttaatagctgtgcgcacctggttaaccctgctgatctggaatttgttgataccgaatatcaaaaggttctggcacgtaacggcgatcctctgcaatcaatgctggatctgcaaaaccacgcacaacaaagcctgtctgataccctgaattgggttccacgtccgaacgaactgaaaacgtgcggtgagatcctggactggctgaaactgcaagatgatgcgatagcagacgaaacccgcgaactttacaccgctctgggcggtatgtctcgcggcgcaaaacctgcttccggtgtctggaaaccgtggaaagcaaatcaccaggaactgcgcaatcaggtattcgcagaaatgaaagaagaagacaaactggaaatcttgtttgaactgattgaccagtggcacttcttcatgtgtaagttcctcgcgttgggactggatgcggaaaccatctacaagctgtatgctctgaaacaggcggaaaacctgcgtcgttgggctaacaactactaatggaaatcaccgcgctacatgccgtatttgctttgtcttatatcgtctgcgcggtgataacgtatctcttcggttggtgcgttttccacgttaacggtgttgacagaaaagccgctttgatagtattatcattgctatggtttataggttttttctacgtcatctatgaggggcgaaaatgattgacaaatactatatcattgttacgaaagacaaagacggctttactattccatacattgaaaacgggaaaacgccggaactgtttgcatcaccgcaacttgcaaaagataaattagattttatccgcaagtgctacgaaaccaaactgaactacacgccggatgaaccgcgtttcagtttcttccgcaaaaccgagcaactaccagcaaccgaagaacagaaaaaagagatgcgttggtttattgagaattcgaaaattcaaggggtattactcaaattatgagcgagttaacatttgatgatctgagtgacgatcagaagtccgcgcatgatcgcgttatccacaacatccagaacgccattcatacaactattacgggtggccctggtgttggtaaaacaacactggttaagtttgtctttaacactctgaaagggttggggattagcggtatttggttaactgccccaacacaccaggctaaaaacgtgttagcagcggctaccggaatggacgcaacaacgattcattctgcattgaagattagccctgtgactaacgaagaactgcgtgtgttcgaacagcagaaaggcaagaaagcgcctgatctgtctacctgtcgcgtgttcgttgttgaagaagtctcgatggttgatatggatctgttccgaatcatccggcgcagtattccaagcaacgctgttattctgggactgggtgataaagatcagatccgtccggtaaacgccgatggacgtgttgaactctccccgttctttgatgaagaaatctttgatgttatccgtatggataaaatcatgcgtcaggcagaagggaacccgattattcaggtttcacgggctgtacgtgatggtaagatgctgaaaccgatgtctgtcggtgatctgggtgtgttccaacatgctaacgctgttgacttcctccgtcagtatttccgccgtgtcaaaacgccggatgacttgatcgagaaccgcatgttcgcttacactaacgacaacgtggacaagctgaacgcaacgatccgtaaacacctgtacaaaacaacagaacctttcattctcgatgaagtgatcgtgatgcaggaaccgttagttcaggaaatgcggttgaacgggcagatcttcaccgagattgtttataacaacaacgaaaaaatccgagtcttagaaatcatcccgcgtcgggaagttatcaaggcggagaagtgcgacgagaagatcgaacttgaattctatcttctgaaaacggtatcgctcgaagaggaaaccgaagcacagattcaggttgttgttgatccggtgatgaaagaccgtctgggtaactatctggcctacgttgcgagcacttataagcgcatcaagcagcaaacaggctataaagccccgtggcattcgttctgggcgattaaaaacaagttccaggatgttaagcctcttccggtttgcacgtatcacaaatcacaggggagcacgtatgaccatgcgtatatgtacacgcgcgatgcgtatgcgttcgcagattacgatctgtgtaagcagttaatctatgtgggcgtaacccgcgcacgttacaccgttgattatgtataaggggctttgccccttttgaggttattatgaaattgactatccttgtaaaagacattccccgaattcttgaagcactcgataaaattcgagaaaaagatccacatgcggtcaatgtgttcgggatgtatagcgcagcagatccgcaagaagttattcaccgtttgcgcttcattgaaaagtctaacgatgttctttattctccgaacgggccaagttattcatggtctcctattgcaaaagaagttgaactgacttatgatgaatatggcgttatcgtgctgatccttagaatggcacgaaacattcgtgaagataaagacatatggacactaatatcatgaaaaaagatgtatctatccagatcccacgcctccacgcggaagcaattgcagacctgattttcaaaactccacgcacagaccttccggtgaatattgatattgatttgctctatgaattcatggaagctgttgaaaatgcaagccgcctggaaaaagcgatctatcattgcggtttgcgtcagttcggaatgatgtcaatggctagcgaagagatccgaacattcgacatcaacccagaagttgcgcttacgctggcatacttcatggaagagtacaagcggagaagttcatgagtcatttacccgtagattacgtatgggattatgaaacggttggtccttccccgaacgggaaggtgatcgaactctcatacgttccgtttgttgatgatccacacaacccgccaacgttcgcggaactggttgcaaggggacgcaaatacaaattcgatttgcgtaatcagcccgatcgtattgccgatcagggaacaatcgcctggtggaaacaacaaagcgaagaagcccgcacaatcctgaaaccgtcgccggaggatttggaactgtatgcaggacacagacaattcttcgaagacctgaaagcggacggtgtgagccgttggcaatcactcgattatgttcgtggtcctgaattcgatcgcggtatcctggttgatatcgtgcgtaagatggttggtaagatcgacatcttcgaagatatgccgaccgtgttctggaatagtcgcgatgtgcgtacatgtatcgaaaaccgcctgttaacgcgtgatgcttcgacctgtcctcttcggaaagggttacttgatggttttgtgatgcataattcaattcacgattgcgcgaaagatgttttgatgatagtctatgcattgagatatgcgctggggctggaagaacccccaagtgaagaagaaaccgatccattgagtctgccgaggaaaagatgattaaattatcatttgtaggtaaaactgtacatgcaaaaacactgaacgaagcaaaagcgcagatgtttgacattctcatgaaccccgcgttcgttaaagtcgaatacgatgaatatgttgttcagcctggcgatagcatgtattcaatcgctgaaaaattatacggttgtggtgagcgctggcagtctatcgctaagttgaaccgtaaaaccgttagtaatgcaagctatatccttccggggatggttctgaaattgcctcagttagtcgaattatgataaaaagcccttgcattcgtgcaggggctttgttattttgtagggactgaaacaaaagaggatgaaacatgtttggtgatttgaaagaaggtttgaacattttaatcggatttgcgatcattggtgtgattgcgtgtgtatccggtgcggtgtggttgtcttatcaggcgatcgtgtggttgggtgaatggcttcacattctggcacagtaaggggatattatgcgtttatgtttagttggtgtaggtttcggtcgtgcgttaactcaagggttaatcgactcaatccgctggattcagccaaatgttgaaatgtattcattacctaaccggatcgaatactctgatccaacaccgtacaaaatgaaaccttatcaagcgccacgcgttaaccgtgtgttacatcgtcaatctgtaaacaggggtaagtgatgaaagagcttacgatcgtcgcagcagttctgattttcatcatagtttcaatgattatcgtcagactgtaccagcacggggaagcgtttgaatggttcctggatcacgacaaagcgtttcgaaagcatttcgcgggtgagttcatctttactcatgtaagcgtagcaagcggtacggtaacgtttgattttgacgggaaagggaaatcataccatgttgaactctcccttatggatgctaaacgcgtgtatgatgccacacaaaacggcggtatgcgaaagatgcttatacctctttcaaaataattttaatagcctcttgcaatgcaaggggcttttttgtatattgcgcacataccaaacggaggcaactatgacacgtattaacacaatcgatccttctcttcttctgaacgaacacctgattgcagaactgcgcgaactccctcgcattcccaatgccgttttatctggtaaggcaaaaatcaacctgtcgaaaatccctgcattgtatacgctgggaaccggacacgtaaccttcttttacaataagctgggataccttcgcgatcgtcatgctgcattacgtgctgaatacctcacgcgtaacggtaaagaatacatggacggtgcatacgaagatttcgatcttagtccgctgtcaaactccctgtttcatcgtcatttgtgcgcggactggcaaccaacgccggaatcagtgaaaatcaatgttgagcgtatccgtgaacgtttcgaactgcgcaaacgtgcttatcggttcggtactgagatcatcaacgacgaagcggcatgggatacgtattacgaaaaattaaaagaaaaatacgattttctttgatttgggtattgacccaaatttcgatatgcagtatattacacacatcgaaacgaaacagacaaaaggaacgcatcatgaaaaacttagaagccaaagtagttaaagtcctggttaagaacggtttcaacgaaaacgacgcggtagcaatggttgaaaagaatctgaatgatgcgttgaaagttagaccagaagcaaaacctgctaaactcgcagaggtgattgtatgcatcatgtaaaagtaagcatcaaggatatcacggtgggtgacaccgtgatccacgaagggaaaatgaagactgtcgggaaaaacgatatcaagcacgaccctttgtttggtgttctcctgttcggtgatagtttcaacttggggagaacttttattgagcgggttattttcccgaaatggtatcaagggaaacgggtttagcaaatagcactttttgctaaagacttcacgggatagctttgatatagttatcccatcgaaacgaaacagactttaggagattgccatgtatacttttgacgaactgaacgccgcagcacagcctttactggatgcgatgttcaaagcccgtaacggtggcgcattcgaaaacgaattctttgaaactgttttcgttctggaaaaaggccgtaagtatcatcgtattgtgcaggatactcgcaacaaacagactggtgaaatgttcgatcagcgttcagttgctggtttcctggacaatgacggcaatatcctgaaagccgcaggatggaaagcacctgctaagggtattcgcggtaatatcttcaacaatccagagaacgcgatcgaccgtagcggttacgttcgctatcttcgctaaaatcggggcttcggcccctttggaatattaaaatgaaactatcagcgaccgcaagttggtcaatcttcggactgatagccgcaggggttttattcttcgcatggcaatcaagagatccgaacaaagcggcgtatgaagccgcacaacgagtagtagaacaggatgcagaagcgcaacacgaagcaatgttaaaacaacgtcgtgatatgggctttgtggagactgtgagttacacaaacgcctttggtgatgtcaccacgcgctctgtaaacgtcttagggcgcacgaaagggacaatgctcaccatcagacgggaaggaaccggaaagctcgtagacgtgtgtttccgcgcgattacggacgattccaaacgtagtcttttcgccccatacttttctacgcctgtctttgcaaaatttgacggcggagaaacaaaagagtttagcgcaagcagaggaagcaccgaagattttctgtgtattacttccccgcaacgcttccttttcaatatggatcgtgctagtgttatgcaagtccagttaacattcctggatcattactccaaagtgccggaagtacatgaatggaacctgtcaacatataatgaggttgtgaagaaatgagcagacgcccaaagaacagcaaaaccgaaatgtttgcaacgtttgatgtaaacggaaagaacattgagggtaaaccatgcacgaactcaaagtttatgcatatcgccggattgcctggtatgagtgttaagacttcgtatgattgtcattacaacgaagaaaccacctctgtttatttgggcgaagaactcatggctgaacgcgtcatgcagtgtgtgcatttccctggtgaacgtccagaagtgaactgttttattgttggttatcataaaggtattgtaaatgagcaagtataaagttggcgatatgtacgccccgaaatctattttaatggctgtgtgtcaaatggcatcagaagccgatccgattcgtcgtatgtatgacgcattgcgtaagaatccgatggacttcaattcaccacgccgtatcagtatggtgtatgaagaaacagggattctttatcttgaaggtattcccgttcctgtcaagttcaacgatatgaaagggcttttcaatccggtatgggttgcgccagaaccggaaactgaaatcaaccacgtcaataaaggtgaggaagtaccgcgcgaaaattccgctgtagttctggataagtttttcaagaccgctcatagcgtcaaaaaacgaaccgttagcgacgtggttcaccacctgtccgcagaggttggggagatctccgaatgtctcgttcagcctcaacgcggcggtgatatcgtcgaagaaagcgttgatgcgatcgtgtgtgccctggatgtgatttacctgaaactgagtacaacccacgggacgacagaaatcgcgcaagtgatcaataaactgcttgataagaaattagataagtggtactctacttgtagttaatcaattacgaggatcggatcatgttggtttatcgcgttgaattgaaagcgtctatattatccaaatatgatggatggtgtaagcaattaggcccgtatacgggttgtgtcggtgatgaagacgatctctatgagtatctcgatattcatggaatcgagttcggtttaaacttcggtatctccgagactcgtcaccccgcaccatgcgaagaccttcgtttaatgcgtaacctcaaaaaacatggtaaaaattatcgtagctatattttcggcttctcttcattgcagaagttgtctaaatggttcgatagctgggagcggcaaattttggagaatcagggatatatttgtatggtgtacgaaactgatctcatgtttgcagggaacaaacaatgtgttttcagcaaagccgcaaccccgatccgttttattccattgtcagagatttattaatgccaacatatacctataaatgcaccaagtgcgaaaaagaatttccgaaaatgtccagcatcgcaagccgcgacgaaccgaaagattgtgattgcgggggcgaggcgaaacgaacggttgataagccgcagatggtgaaagacggtttcccgtacaacaagtaaaccccgaaaggggttttctttttcatagaaccctatataatgcctgagaactaataaagaggtgaatatgagtttagatttcttaatggacgataacgagccgcagaaagcaccagaagccccgacaaagggcgctaaggtggatgaatcattctgtttgagcgatcgcgatcacattcgcaaacgtccgaacatgtacgtgggttcagtgaacaaagaagcccatgaacgttttatcatgggtaaattccgcaaagtggaatacgtggaagggttggtgaaaatcatcaacgaaatcctggataactccatcgacgaagcgatccgaactgatttcaaatttgcgaacaaaatcgaagtcaagattgatcacaatctggtcactatttcggataacgggcgcggcattccacaagatgacgtgagaacgccggaagggaagattgttcctaaacctgttgcagcatggacaatggctaaatccggttctaacttcgatgacgaaaaccgcgtaacaatggggatgaacggtgttggttctttcctgacaaactgttacagcgcaatctttatcggtgagacatccaacggtaaacgcaaagtcacgatcaactgtacggacggagcgcagaacatggattaccgcaccagcccgacgaaggagcaagggacaaccgttaagtttacccctgacttctctatcttcggtgtggatggtatcgacgaagagacaaaggaagtcatcaaagaccgccttatggcgcttgcagtggctttccctgccgttaaattcacatataacggcgatatcctcccgaacaaattcgcgatgtatggcgcgatgtatggcgataaaacgattacccagacaaacagcaaaatcagtttcatcctggcaagcacagaagacggtttcaaacagaaatcattcgttaacggtttggatacgaaaaacggcggtgttcacgttgacaccatgatcgacggcatctattccgaactggaaccgatgatcaagaaaacacacgctatcgagatcccgaaagcccgtgtaaaagaatgcttgactttggttgtgtttttgcataacttcaatgcaccagcttttgatagtcagacgaaagaaaaactgacgaacaccgctggagagttcaacaaccacgccggactgaactacaaaaagatcgcgaaacagattatggatacttctgaaataatcactccgatcattgagtccgctctgattcgcaaacaggccgcagaagccgcagccattaccaaagcgaagaagaaagctaaaaaggcgaaggttgcaaaacatgttccggcatcagggatcgacactgacggggtagaaaccactttgtttctgaccgagggcgattccgccgtggggcagtttatcgagtgcagaaacgaagagacacaaggcgcatttccgctacgtggtaaaccgttgaacacctggggaatgagtaacttagaagtgctcaaaaacaaagaattgtctgaactcatggcgatcctgaatctccatccaggcgactcttccgaaatgacttacgacaacatcgggatcatggtcgatgctgacgttgacgggggcgatattctcaccctactgattgcgttctttagccgctggcctgagttgttcgagaagaaaaagatccgttatatccgcacaccgattatcattgcgaaagtcgggaaagatgaaaaatggttctactcccttgaagatttcgcaccgttccgcgataaggcgaaagaggtacgatatatcaaaggtctgggttctttacgtaaagaagattacgatcgtgtgttgggcgaccagttaaaatacgatacaatcgtactgggcgatgaacacaaagacgttcttgaactgtgtttcggtgatgattccgatccgcgtaaagactgggtgaacggaaaacataaattttcggtgaaataatggaaagaagtattaaagacgttgtacaggtggaggggcttacatttgccctctatacaatttattcccgtgcgatcccgcacctggtagacgggttcaaacccgttcaccgtttcttcattcattccgctgcaaaaggcggtacaggcttccagaaagtagcctctatcgctggcggtgttgcgatgtatggataccaccacggggaaacatccgttgaagaggctttgtctctcatggcggcgcactggtgcaataatatcccgcttttcgaacgtgatgggttctttggttcccgtctggttaagaagcctggcgcaccgcgttacattaaatgtaagctgtctccactgttcaaggctatctacatggacgaggatttaacgatcccacatgaagaccctgaacatgtaccgccagcctattacctgcctatcattccgatggtactggttaacgggttcagcgggatcgcgaaagcatacgctaccaacattccaccacacgatccggtttcggttctgaatgggtgcgttagctacctgaacgggaaagatttcacgcttgacctgaaatacccgcactttaaaggcgacatcaaagacgggacgatttacggcaagtatgaactccagggtaaaaccaaactggtgatcacagagattccggtcaagtacgatcgcgtgaaatatatctctattctggataagctggaagagaaagggtatatcgtaagctacaaggatctatcgaaagaagatttccgctacgagatcaccctcaaacgcgagtatgcaaacgggcttacccctgagaagatcctgaaagatttcggattgattgagaactcaaacccgaacatcaatgttatctttaacgggaaactgcattcatacgagcgccccgaaacgttgctgaaagacttcgttgatatccgtattggtgtttaccaacagcgtattgataaacgcatccaggagactaaggaagcgttagataaggcgctggcgaaggttgacttcatcgaccagatgatcgcacaacctgacgcattaaaggggcttagtcgcagcgaagcggttaaacttgtctctacgtggacgggttgcgggaaccacgccgaaatcctggttgcgatgaacatctatcatctaaccacggatgaacgtcaaaagctggaagacgaagcgaacgaactgcgtaagcaactgaaatactgggaagaaacaaccccgaaaactgaatatctcaatgatttgaaagaactttcgaagaaattgaaataatttacaaaaagcctcttgcgttgcgggaggcttttttgttatagtgtcctcactgatttggggaggatataaaaatgttcaaaactcgtagcgacatggaaataaccatttgggccaaaagcatcatggcgaagcatggtttatctcattggtctttcaaaattaacggacgtttcaagcgtactctgggacaatgcagctacggtcgcaagttgatcgagttgagccgttctcacgttaaggaagatatctacgaaaacgttttagatactctcatgcacgaaattgctcatgctctgaccgaaggggctggacacgggatcgtttggcaacgcaaagctatcgagttgggcgcacagcctacaccatgcaaaagccgtatccgtgagaaatcagtaattcaggaaagcgaaaaagacgtatacgcatttttcctgaaaactccgaacggtgaagtttatcagtgcaatatgacagaaaagatgtacaatgagatccaggaaggtaaacgcaacattgcaaacatctatatttcaagaaacaaacgagcaaccaaagggcgcttagtagcgcgtaaattgacaccagaacaatatgcagaggcgattcaatgaaaccatatgatgcaccaaaaacgggaaaatatattacaatagctgtgctgtgtactattgcaatatgttttgtaactgctatcgtggtcggtatcattgatatgaaagaccgcgaacgtcagaagcaacaggtttacgaataccttaacaggatgtgcaaacctattgaatacgggcttgatcaaaagcctgtgaaatattcttgtgacgacataatctttaacaccaagtgagatataaacaatgaaattacgtcagttagcaccgcaaaccattcacactacgggcttcgataaaggcgaacgcacgaagtttaaaatggctaccagtgcgaaaacgttcaaaatcctgtcatcaaccatctacaaatacaagatccgcgcaatcattcgcgagatctcctgtaacgccattgatggtcacatggtagcgggtaacatgaatccgttcgatgttcagttaccaactgttctcgatccgcgtttcatcgtccgtgattatggcacggggttaagtgactggatggttaaagaggtgtttaccacctacttcgaatcaaccaaaaccgacaccgacgaactgatcggggcgctgggactgggtagtaaatccccgttctgctacaccgaaacattcactatcgaatccatccaggacggcgttaaacgcgcgtacacggcttacatggataatggtgaacctttcgttgaccaaatctacgaaatcgaaacagacgaacctaacggcgttcaaatcactgttcctgtgaaagtcgaagatatcgcagagtgggaacgtgaagcagcgcgtgtttacgaaccattcacgggtatccgtccgcgctttatcggtgttcaggttgatgtcaactggcaaccaaaagaagcagacgaacgcgggatcatccgttataagtccatcaactattccggcgtatacgcgcgtatgggtaacatttgctacccaatcgacatggatatgttcgaaaactcgctgttctattgctaccgtaacagcaattacgcttatattctggatttccctctgggatcgctggacttcatgccgtcgcgtgaagagttgagccttgataaagtcaccaaaaaagtaatcctggatcgactggaaaagatcaacaaacgctatgacgaagaattagttgcagagttcgacagacaaaaaacaacccgcgataaactcgtatggttcaacaatctgcctagtttgttacagacatttgtaacccgcgataaccgtttccgtgtgggtaaaaactcactggctgaaatcctgacgcatatcaaaagtcctgagactgcaaccggaaaatacgtctggggcttttgggctaacccatatgacgggaaagaatgtgtatatgagcgcgttggatctggacgccgttatgagacatacaaagcggaaaccaccaaacgacaggacgttatgcgcattatccaaccgtggcgacagaagaaactgttcattgttgaaaacgacaatgaagcgcgttcactccgtccatacctgatcggttactgcatgttgcacggttcggatcgtatcagtttcgtaaccaaagagattaatagcgatcctgttcaggacttgatcagaactgggtatttcgacgaatccgaaattgtcacactgaaaaccagtgaattaaccaaagaatttgacgtgtacacggaagatcgcaagcgctggaaagcaacgcgtgaatcatcttctggtgattgtgaatcgcgcccgaaaacgcctacagcatatcattacttcctggatgatcggggcaacttacagaaaaatgatctgtacctgaccaaagcacagttcgtgaatctggatgaaatgtacgctatgcgcctgtacgggattgatgaatatagccgactggatggcgaagcaccgaactattctctgggtagcatcgccagcagtatgatgaccatgttaaaggtcacagggctgaaagatgtgatggttctgcgaaactctctgtggagtcgcattccagatagcaacatgaaatgtcttgatgattatctggtaaaacgttttgcagacgcagcgaagaagatgaaacctaactggttccctgcatggatttcatcaaaccacggaagcgagatccgaaccctgcgtgattctatgggtgtaacccttgatcgcatggttaaaaaccgttacaatccagaattgtatttgttgcttgattatcttgatggtaagttcacctacgatactatcgagggcaaaaacaaatcaaaaactgtggtgcgtaaccccttacttcgtgaaatgtcaacgaagtattacaaaatgcggaaagatatgaaagaacgcgttgatactgcttacgatttatttgcagaacgcaacccatcaattcattacatgttgttacattcatcttattctacattccgcagtatgtttaatgatgataaaattgtgatggatttggtcaaccttatacggtggaaataatgagaaacgttaagatccttgatgatgtacaaaagaaagcagtttatgagggctttctgaccagcgcaaacaaaaccgcactggctaaacaatttggtgtaagcgtccgaaccatcgggcgcgttattaccgaacagcattctaagtataatacggaagcatcgaaaccacttccgcaaacagatgtcaaatctaaaatgattggttctgaatcgttcattactctggtactggacggcaagatcatcacagcggattcgtcacaccctaacttcgaaaaagcacatgctttaatggttaagggtgacattgagggagttgctaccctgttggacacaacgcaagcgttgaagatttacagcaaaggcaacattaaaatcatcgggcataaagtcctgtacaaagatatcgtgtttgacagcggtatcacgcaacgtatcgttcgtgaaatgtacaacgatcgcccttacgagcacctggtgaacttcttcgagaagttgatggaaaacccttcacgcgatgctgtgtatcagctttacgggttcatggtgcataacgatatcgaactggcagatgatggagatttctacgcgtggaaacgtgttcgtgaagacttccgcgatctggcttccggtaagttcgataactcccctggtgttgtggttgaaatgccacgtaaccaggtagacgagaataaaaaccgaacctgttcatgtggtttgcatgttgccgcaaaatcgtacctgcctcactatggcggaggacgtgggcgagtcattcaggttaaggttaatcctcgcgatgttgtagcaatcccaacagattacgacaacgctaagatgcgcgtatgtcgttatcaggtgatgcgtgatgtaactgtgggattcagtcactactaaccccaaaacagcgcctggagcgattcaggcgcggaggattcgattatgaaattcctacagagcattcctgactactggcagaacttgagcggggcagaaacagccatcaaaaccgctaaagaaatctggaacggaggcaacgttaccgctggacgtacagaagacggcgaacagacatatttcaaaaaaccttacggtattatcgcaacagcccttgcatttaatctgggttatgttatgctggtaatcgcaacggttcagaagtgggtagagataccgatgaaatggatcgggacgttgttgattcgcttagttcgcttagtgttcggcgcaacgatcttgattttgtcatgccctatcttcttgctggtactgacaatgaatatgaaaactggtgtaaacaccaaattcggaaataaactggtaaagaaaaatgaaaagaattctgacaaggcttgacatccacaaatatgctgttaagataggtgacatgaagcgcggtgacttcaccaagttcgaaggggttgacctgaaagaacacggcttctacctggtagttgatgataaaacgggtaaggtagtattccgattctacgtagccccaaatcaacgccgtaagactggcgcaaaccgtactctgttacgtatcaaacgccgcgaacacgaaccatcagcgatggtggccttgctggatagtgcttctctgtacttcgttgcacacgataagattaaaaacctctttggtttctcaaatcttactggtacaatagcggaaagcgcgattcagatgcggttcggggatggtgagaactatactgaatacaaccgcgcactaaatgatctgtttgactttgaattccaaccatactaattgagataatgaatatgaaactgttttccaaaatccgttctgtagatgaaatcgtagcaacttttgacaaaaccctgaccgaactggaagcgcgtattgctcacgataacgaacaggtcgcacaggtagcagcagaccgcaaagcagcggaagaagaacatcagcgcaagctggctgaactggctaccaaagaaagtgatcataccgcaagcgcaacacgcgccggacgtatcgcggataaaatccgcaaactgctggattaattctctaaaatggggctgaaaagccccaataaggaaaataatatatgtttgtaatttcttcgtactatgattcacgtcaacgagtatcgctgtcttctatttccaaagcaccaaaagatatagatgacttcggattgcttaacttcgtcaagaaagaaatcgaccgcgttgttccagaaaaatacagaattgttaaaggatctgatagcttaactatcgtaaaactgtatggcgaagtcagtattcaacatcatgtgccattatatcctcgatgaacaacctggtagcgaaacatgatttcaaccgcgcttctactcaccgcgatcgcaagcgagcacttaaagaagcaaaacgtaagcagaaacataaaggtaagtgtgatgaaaaccgctttgattattcttgaggaaatcccagaaaacactgggctgtatctcgttgaagccgacgaagatatcattgaaatcctcaaaaccgctcacggacattatgtgaacggatgcaacaataccccagaacaggatcacgctgtcaatatcgttaacctcatgttagggccgcgtacagatgacaacctgaaatgggcgagcgaatccaacgttcctcatgagtatgtcggaatgtattatcagtgcaacgttgacgataaagcgccactgataccggaaaaacagatcgatttagtagttcgaacaggtttcttcttatgagttcacaaattctgttcagcaaagaagatccattaggcacagattcatcggtgcaacgcttattctggcagatggattatgcaaaaaatcgttgtcgtaacccaaacaatacatggggaagcaacgaagacattgataaagcaaaaatttatcctcgcggaaaagcatactggaaaatttttgatatccatcttcataaagttatgaaagattcgaacgcatgataaaaagcccttgacttcggttgagggcttttgttatattggctttgtcgaaacgaaaccactaaggagattcaccatgactaacctgactaaagttaccgcgacatacttcatttcttctggcgctaaaaatgctatgtacaccctgcgtgtagagcgtcgtggaggtgaatttacttctgataactatatctgcaacctgtctactgacccagataaagcggaagcgaaagcgcgtgaatacttcgatcgcatggtggatcgtcttaaccagaccgatactttccagatggtgttccagggcttcgcagatttcgatctgttcgaacgtcgcggtaaactgtctgtacaggataccgaaaatctggaactgttggagaagggcatcatgccaatcggcaagcgtaaaggtgaagtgattgctgatatgccgatgtatactattctgtggtgggctgatcagtgcaaagaaaacggcaacgatagcccagtatttcaggctatttgctcttactgcatgggcgtagcgctggagaaggattatatcgctaaacgtgaagagatccgcgcagaatgggaagcagagcgccaggcgaagatcgcagcagcgcagcacatcggggaaatcggtaagcgtatggaaatgagcggtgttgttgagaaagtgatttctctcggatatacccaagtttcttattacaccgaagtggaacgtttcatgaccaaaatcaacgtagatggtaacgtggttatctactacggaaacaaaattgttgaagagggtgatgtgattcgcttcaaagcgacacccaaacttcacaacgaatacaaagaagttaaacaaacaatcgttcagcgagtaaaggtattagaatgacgtatgaagaaatgttaaacgaagtgtgcgcgggtaaaaccgcgtaccgcccaattaacccagatatgatcgtgttccgcgaaggggatacgatcattcgacgttctcaccgcaaggttgagattaaccaggtattcattgccagtgttgaagaacagaaagcgaccgactgggatatagttgcagaagatgataaccacgacgaacttgacctgatcttagtcatagataatcacccactgggtgttcgtccgtacatttaccacaatcaattcagaggcgaagtgattctatcatgacacacgacgaagccatgaaagccgctacacgcggttttaaagtcgcccctgtgggtaaggctgggttctttgtatatcacagcgtagaggctggtttccggcgcattacgataggtaatgttggatactggaacgatgaatatgttccgacaccttacgaactcatgcgcgtatgggacatatacgataaaaacccgatgacgaaagtaaaagatttcatcaatcgggctttgagtagtttgaaactgaaattatcatcgaatcctgcctaaaattcttgcggcctgattgcacacggtcatcaacttcgtatcggtgacttcgggcttctgtatataccattccattagaatcgatccagaatagtagttttcgagattgaaataaggacaactaaaggtatatgctaccggaacaaggtcttttgttggaagatacgggcttgcaatatctgagatatagtacagcccgtttatatgtctattatactcttccgatgtcttgtctataggatagccacccagatttttcgggttaatctgttgcggtaacttcccttcatacgcaattatatcaacaaaataattgacattcttaggtctgaacccaaagattgccgaaaaatccgcacccgtagttaaatgcactatgtttaactgttcgatggatgcggattcaaacttttttgccttttcaatatccatcgtcggcacgtctataacgcttgaagatgttttccagactgaaaataagtcatcccacttataccatgttacgaacataatgaaaatagtgacgataagaaccaatttaatgaataactgtttccatgttttgaccgccatgatgaacgatattacccgttcaagcaccgccaatttatcttgtaatagtgccatgtttaaacctcaagttcgggggatgccgaccccgaacatatttaggaatttacttaacgttgagtaaccaaaccagaacggttttgacctacacgggcgtttagatagtcataccatctggtcgcctgagaagaaacaacctgatattgacgatatccatcatgtatacgtccgttgttgtcaaaatcgaatacacctccgtcatccatagtaagccgtaagttaacagcaggaccgttttgaatagtgattacactgatatcagggcttgattgtgcagcaactacagtaccgaacgcattaccattaaaactaccaccgaccgcaggataaccagaaggttttgaatatggcgagtaccaaccaaccccccactgaccacgatatcgggcgttgttatagtaacgctcatacactgtaaagttgatgttataaacggactgattcgccatttgtgacatccagaagggtaaaccgattcgaacggcattaccagcagcagacatcaatcgttgtcctgtttcaccgaccgcagacgaaccgatccacccaggaactcctacaatagccataattttacctctttaaagaggggcattacgcccctattttccgttcgattgcttccaaacgttcacgcaattcattgattgccgtaatcagaagcgcgttaacacttgacggggagatcgtcaacattccggtttcttcgttttctcttactgcttccggtaaaaccttttgcagatcctgagcaataatacccgcttcacgaccattaggttcatcatcttcgactttcagtttcttatcgtagatataacctttaagctgttcgactttactcagtgcatctttcagttcaactaggttagatttcagcctgatatcagaacgaatatacacatcgttaaaatcaccatgtgcccctgagtaaatataaccactggctttgaattgaccaccattgtcgaaggaaaaatcagcaccaccaacgtgcataactacaactggattgccgccacccgcatggacatccattgcggcaatatgctgatcgccccagtgtgtagctttccagatgctgtatgcttggtttctggagttaggacaatccaccaacaacccagcagcacggtcacgccattcgacccacgcaccaccctgaacagtaccacgaagtaaacctttatcgccaccagtggttagcgcacctgtagtttgaatcatgccgtcaccaaaacgagttgaatattgctgactcgtagtacggattttcaacccgccatcaggttccgcatatataactgccttttcaacagtaccagcattgtttctaaaccataagtgactgtttccgtctgagtttatgctcacaccgtcgccaccacgaacagatatattattctgtgcgtatgtcatgccattaacgtaagcatcaccagaaaacgcaatttcaaccaagttatctgatctacgctgtgtataaaaatgatacccagtaccgtcatgtacctcaaaaaccgcagcacgaagaccactatcaccccagtttctaatagtaaatgcacgttgactaacagcagttgatgcagagttaccaagagttaacgtagtattatctaaccgaaacgccgcgtttggtgtagaaacagcaatatcacctaatcggttatacaggttaacggttgcctgattacttgacccatatccgaaataagagttcaatacactcgtatctctgttccatatctggaacattgctgattctgttgcaggtttataacggatcttgaatccatcattaccagcatcagcagtgaacgtaccaccgtaaattgcgccacctcgacctaagccattaccatcaataaaaaattccatagaactatcggtagcacctgacatcagtcggtattgagttccctgtatagtttcatgccatatcatatcagggagaccaccacggaaacgacgtagtaagtttttaccgccagccgcaccagttgacagcatttcaattttgggcaatgccggatcaacaccattcatatacagcggagttgaagaagatattccacctttcacatcgatgaatatcgtaccagcaccacggaaatagtgataaaattttccgtcatcagctttcacgccaagatgcgttgcgccgtcaccagaagcattaccatccgaacttgtatcaagtcggatcaagctgttgtttgctggcaatccagcaccattaacaaaaatttgacgtggtgcggtcaaaccgtttgccagaataagagtaccatcagcagcgaaacgtgttacataagaaccacctgaacgaacatataagtttttaccagtatcagcaaatatcatcgctaattcgttaccgccagcatcacggaattcgacgttacggtttccgtcgccttttgtgatcagttgggttcctgttaagttaccactgaccgttgtactcataccaacgtttaacgaagcaccggaaaggttaattgaaccatcccagccattaagcccaatctgagcgcgtagaattcccgtagcgcctgttgtcttgtttggtgcatcatatgcttgcagttcgatagaacccgccccagtagttgactgatgcgataatagagcagcaaggttagcaccaccaaaaggatcggaagtattcgattttgtgttgacaaacaaagtaaacgtgcgcgtatgctgtgacgggaacggatctgtaaccgcgttgttatctgaacgagtagttaacagataaggagcattccccgcagtatcagcaactatgttaatacgacgaggaaccgttaactgggtgttgttctttaatgtcagatcacccgtcatttcgtcgccagatttcttaacctgtgcatcgttggttacgttgcctaatccgatttcggcttttgtcggtttgtcgttttcggtatagactttaaagcctttatacgttaatgtgtttccagttgggagtaaaggcaaattagcctgactccatatagtattaccgccgatggtagtacccgattttaaatctgccattattagatcctcaaatgcttttatgatatttataaaaagaaaaagccccgaagggcttttcttattttcgggctttgagttccctgatttcctcacggagttctttgatcgcattaaccagcaaagcgacaacagcagaagacgaaacccccaggatttcatttccttttgtatcttcacttgtggtaactgcttccggtaatactttttgcagttgttgcgcaaccaagccagcttcacgggtagtaggttcaccgccgatatattccgctttatcgtagatcataccttccaacagatcgactttatccaatgcagattcgatcttactgaaattacttttcagtctttcatcagaacgaatatacacatcgttaaagttaccattaccagacacggttacttgaccatttgcatcgaaatatacgtattggttactttggtgaatcaatcgaacacgggattgcgtaggatcgttatttggaatatgcacgtccatagcagcaacatgggtagcttgccatacagtagctttccagatgttatatgctgaggtagcaccgttaggcatatcgatctgcaacccagatgaacgctcacgccactgatcccatccaccaccatcaggtgttcctcgaatcaatgcaaaatcagtaccagtacaagggtcaccgctatagatcataccgcctcggaaatcccaagtggtttgacgaacgttatttgttcgaatgtggtattgtccgttagcatcaccccaagttgccgccttttcagcgccgttaagcaaacgataccaaataacactattaccgccagcatccagatatatgttagacgaaccaccctgagcaccgtttagcgttaagccgccagcactactaagagtgaaaagttcagcagagtctgtttgacctgttgctaaacgatacgcgccgccctgaacagtttcgtgccagatctggtcgccattgccaccacggaatcgacgaagataattcttcgaaccagttgcggttgtgcttaatgcagaagaacaataaacgttctgattcaatgcatcctgattaatcataccaccgccaggaagcgtaaagttaccatcttcaccgaatacgaattcacctgaatatgatgtatttccgttagctttgtttggtgtataacagctaatacggataccctggcgacgagaagtattacttactccatctttaaagataaaaccgtctatttctgtactaccatcatttttggcatattgaaatatgatatgacgattagtttcatttttgaaaatcacgtcactaaccgtattgagtgcgccagtcatggtatcgccagctttattcaccgcccccacttctgccggagttggtggagtagacgtgtcgtaaatccgtcgccaaccgttagcatcaccagcactgaacgaccacgcaccaggtgaacccgtaccgcttcgaatccatgatgaattcgcatcgtaatacatttgcaccagagatacacctgtattcaatgtacggcggaagttcgacatttgaccgtaatatgtggtgttgccataaggcccgtcgatcgcgttaccacctactgacagaacatcgttcttttcggttacaacagcagcaccgaaactgtttccttgcataccgcgcggaataccagtgatataacgttcatcatggttagaccagtttgtaggcgttactgtattcgcagttaatgccccgcttacacttaacgtggttgcgctaaccgcagcaaaggtcgaagaacccaccacacggaaagaaccttgttcaacggatacctgttgagtttgagagtcaacaacaaaggaagtatttggtgtgccgtttttgtatgcattcagatagatcctgttgccgccgtcagcacgggcgttaatattcagagttgccagagcaacaccagaaccattaagcccagtgatttgcataatgccctgttcggttgacggagttccggtcacgtcagaacgtttaaacaatatacccggagccgccccgcctgtggtgatatcaacaaaacttttcgaatataatgcgtttgccgttaagttaatacctacggtcacactttggttgaacgtggtgttcttcgcaacagtcccgccgttaatcgtcgagagggcgtttatatcctccgctgttgggcgatcgttctcagtgtatactctccaccctttatacgtcaatctgtcgccagagggcagcagagggaggtttgacgcactccagatacccgcaccacccagcgttgtacctaatttcaaatcagccataaaaatttctcctgtaatgactgtatttatgaaaaaggggctttcgcccctttatctaacgattgacagtttaacgtctttagcggataccgtaccgatgtttgtgttgtttggataacgatataaaccgaaatcaaacgtaacagcaccagaaggaataaccccttcgtttttgtagaatgaatatacgttcgggatcgtaccaacatcacgcatgttgatccctgtgatatacgtattattcgcgtcccagaactgcattacgatatatgcgcctttattgttggcgattgcgttcgcatcgcgtttcatttggcattgcatacggatcgtatcaccagctttcaatccataactgcttagtgatgctttcgttaccgccgcttgctgggtagcagtccattctttgaactgatactccgctgtgtttgttgaagtatattcaaccggatcagaaacaatataatcaagttcagcaaagttatgcgaaatgattttcttgtcacttgcaacaccagtaggcgaaacaggcagagaaagcaatttatcaatcgggttttcgtttccgcttgcgtccacttcggaaagtgtctgcattcgaacaccgttcacaccaaccgcagcaccattacggtttatttcttcgcgcggtactttcgtgatctgtacgttgcgacattgcgccagcccgactttaacggttgacgggtaatgatatacctgtgaacccattcgagcgtttaccggatcggtcgggatagtgaaatatcctgataacgaatgccactgatcaggggctaatccggttgttcgaagaatagatgatacgatccattgtccgctaccgttttcagtccacatatacaggtgaacttctccccctgcatcacggagttctttagaacaatacagatccccagtgaatttgaagatatcgcccaggtaaacatcgttaccgatagaccataatccatatgaatggaagccatacagatccccgctgttctggtatgtctggacatcatcaaccattcgttcaggaatacccgttaccccaatatcactaaattcatcaaacacaacttcaacaaaactcgttgtgttgtctttcaagctaccagcaccaccgacaaagttttccatgcaaatctttttcatcgtcgatgaatagatagctgaataggatgaacggtgagaatagttggttgtggtgatcgggatattaaagaaccgagtttcgggccacgcaacagaaccaattttcctcattgttgctaaaaagttgtcgtcacttttgatcgcatcgaaagtataaaaacacacaattctgttcgctggaagtgaattcaggtagtctttaatcgcattcccgttcgtagcaggatcaccatacatatcgaatgctttgtaatccaataatgctaaagttgttccatcaatgacagccaggttaattccgcgagcagcttgtgttcgtctgtttataatatcagccccgttaatagatacctcaaccgagttgaccgcagaatcgttattcgttccacggacaacaaggcgatatttcacggcgtttgcttctgaaaacacattcgccgtgaaactatcagggccgaataacgccataaattcgttattcgccatttaaattattcctcccacacaaattcacaagtcttagttgttggatttgcgaagattttcacgttaccgattttgatgtaatcacgtacaaccagagtatctacagttgaacccgctaccgctaccgccccaatttctgccggagttggttttcgacctgcatgatagatcaggtttccgttgatcatcgctttgttgtaatcggtgatattgatgttgaattcagtcaataccttatcgtcaatgccagttaagcgcatcttctggacgttaccagagaaatcacctgcctgaacatgtgccgtaccgctcacactggtaaagcgtccacccgtgccgtttacgctaactgacagcgcaccagtcatagtatcacccgttgcgttgacataggtactgtcaagatgctgggtaaagtttcgggtgttgatcacggttgcagtggttgtcccgttatcgttactgattgttacaccgttccaaccgttagttgcagcggttcgtaattgtaccgtaggagtcgcatcacttgcaacaaacagatcaccagcagtgttgatgttagccagggctttaccattcaggcgaatgttcgtaccgtagtacgccagagcaccgttactgatatcacctacagtcagaacgtcaaccagatccgttgtacctgttgccagtcgatacacgcttgcctgaacagtttcatgccaggtagtatccgtcacaccgccacggaaggtacgaagcaagtttttagttccagcggttgccgtactcaaaacagtattagcataaaccgtgtttgctttcgcagactggttaatgttattgttcgtggttacggtgttattaacagttaccgcagcgttagccgtcagagtcccgttagtggttacgttaccaacgaagttgcttgtaccgttgaacgtgttgttgcctgttacggtttgatccgcgtcacgacgcatccagcttgcagctaccacaccgcccagactcaagctattctgtgctgttgccattttcggtaagaagttttgcagagcaaagttcagaccgcgaggcgatacagcgtagaaatcttccagatagctatctacaggctgagtagaaccaaccagattatcaccgatgaatgtattcgatttggtagtgatgaacaccgcaccacggcgcaatgttgtagcaccccaagccggatcagtaccgttcaagaactgcatggtagccggagtaattgccaggttagtagcagtacccgcagcagcttcactgttggttgcacaacgaataataccttcggcggtatccgtcgctttcttcgcttgcagtttcttcgcagtgacaatcacatcatcacgcgtacccgcatcagtttcgccctgagtcgctacgcgtaaagtaccacgttgcgtttcggtagcagaaacaatccccaggttaatcgttgtccagatagtgccggactgagttaaaccgtcatcggtagcaaccgcaacatgatttgtaacgtcgaagaactctttcagcttaaccggaacaaccgccttattcgttaccgtacctgctgcaacttccgcagtggtagcgagggcaataataccatcaagtgattcagtcgctttacgatcgttcagcttcttaggcgttaccgcacggagatcatcggttcccgtgttcgtttctgtctgggttgcgatctcaatcaaaccgatgcgcgattcagtagacgttttacgatgcagcatttcaggagttactacgatcggcattgaagcagatcccgcagcagcaccagttaccacttcgttttcagtcgccagaacaaccagaccttttgacttttcggtcgccgtcttctcgttcaatgatttcggggtgacaaggtcaacaccgttattgaagttgtagacgttcgtaccagcatccccacgtaaagccccctccgctgtcgtagcgcccgttgtaacgagtttcccgatacctgctagggtttcggtcgcgcggcgtgtgtcgagctttttaggcgtgattgcggtagtgtcatcagtaccagcgtttgtttctgcctgagttgcgatttccagcaccccacgacgatcttctgttgctgatcgttcgttcagctttttaggcgtcacgatcacgtcatcgaggaaggttgctgtcgtgttctggttaacttccgcagttgttgccaggcgagcgataccacgacgcgtttcagtagcggttttattcgccagtgtacgcggggttactgccagttcatcagacggcgtatcttcatggttcttgtttacttctgcctgtgtagccagcgcaatcacacccagacgagaacggtttgttggatcgacacgttcaatgatcgggcgatactgtgcaactacccattctttcgttgctttcagatatgacagttccatatatggaagatagtcagtatcggcgttgaaagtcagagtgtcaacactgaaccagtcatcaggcggataatccttacgctgtgggaactgcatcatgtttttgttggtgcggatcttttcaccggaaccatctttaactttgatcgtacagttctgcgttttccccatcatgtacatactgatatacacgcgatcaccttcggcaacatcttgcggaagagtcagcgttacgttacgtacaactggaggactgccagcaacaggagtgatgaacacgtaatcgttcggcaacatgttcaggtcatcactgatacgacgcagacgaacgcgctgatcaccgtcataaacaacccaacggttattagcctgatcgaacatgaaaataccataaccggaacgctgtgaagtcacagaggttacgttgttgataccgtcatagctgatcgtgtgtccgctaccaggataaacttgcagagtcgcaacgttcaccgaagcaaggcgatccagatcgtaagttgtgattgagtcaccatcgtttgcgtaacgaggcaactgcaacgtaattttacccgtcccactgttacggaatgttaccatacccgcttgcatttggaaagcggttaaaccagtcgcattaacaaactgcgaatcacggttatcacgcatttcagcaacacgccataagttgccgttaaaaataaacgcaacggtcatatatgggtgagtcagtcgataagagcttgactgaatatcacgtaaacggatctgacgggtgtttgaacgcactaacaggttgttaacccctgcaagaccaccaccatctttaatagtgataatatcaccctcaacaggggcatctggcagaatataggtcagttcagagaaacgaccgtcagccattaagtacgtaccggattcaacagggagaccgtcattgctcgttacgttgttatatacccattttggatcgttacgggttgagatccattttgtttcatcgaaagcacccgctggtgatggaatatctgcgcgagcgtaccaaatacgacgcgcgtacatgatagccataaacgcagcataaccacgggtagaatcgtattgttggatcgtgttaaattcgttaaaaaagtcaacgttcacgccgtcgctcaacacagagcgtgatgctttaccaacgttgataactttttcgccagcagcatcaaggccacttgtggcgcggaatgatttagctaccattatcgttttcctttatcttattcaatactgatatttataaacaaaaaaggcgaccatcaagtcgcctttttctcacggtaattgttcagccaatctttaacaatcgcgtgatgaagaggattcgcataatctaatttgtttcttttcttgtatggcgtaaaagcgtttttctctttgtccgtcatttggaaaagggtttgaaatgatttgcgttgccttttcgtttgaactgcttctgtggtttcgataatggcatcgggaaaatatttttccttcatgtatttcgctaaccgcatatcaggcacaaataaattaatctttcttttgctgttattgtgtcggatatcagaacgagcgcataactgaaaggctggttcgtaatatttactgacaacataagcatcaactaattcttcctcttcgagtccagaggacaccgcaaccgctcgcaacatttgacgaagccagggtaacgggttgtaactgaataatgccaccacgttagtatagctcgaatagaagttcaatccgtgcgagttatacgggatttcttgcccctcgctaaacttcgatctgtatgtgttggtgcaatagatgaactgttcgccccctagaagcgcctccacgcgttttttaatctgggtgtatactgtcgtcccagattgagagagatcacccgtataacgcgaataatccccctctgcgagcacatgtattttaatgcgcttcgtgtttttatattgcttaaagtcaaccagcgtttgaagcggtgaatctttgaactccacatcatgaaacgtttgtaggatcttccctgtaatcgtatctttgatgttggatgaagcaatggttacatttttgaacttccactggcttacgtcatgatcctctacgaagtaacagacatatcccgaatcgctacattgcatcttcaccggaatagcccctaacagagcacggtaaagcgggaacatcttcattgcgatatcatcacgtttacgaagcccatcataggctaatcgtgtaaccagttctcgtttttcttcgtcaagttttaaatcaacgatatcatcggcattgcaactaaacggcaagcaaatctcgcgtatgtgcttgatattgctattaaatcgcagactttcgaacgcaaccaaatcaggaacttcgtcaatgtatagagaaaaatccttatacaaatcaaagtcatcaatgtttttcagtgctgcatgagtgatgaaaatcacatcgtaatcattgactacttcacgcagcgcatcgttattggttcttttggttcggtgatccgtgtccacaatcaccgctcgtttcccttttacctggttgatgtagtagtcataagactgttttgataacatcatggaaatcgaagcgatgattgctttttcgcccgtttgattgatatggttcagaatcgcctttgttttaccacttgacggaacacattcaatcgtattaaagatcatttattcttagcgtatttcttctggtatttcttgattgcttcgtcggtgatctgtttaggcatttgacgtgctttcttcggtttcagtggttcgacaccgaagatttcaacgccgtaatgtttcagcatcattgcaacgatttcctgacgaatgaagttgcggctaaccttttcagggaattgatctttaatctgcttatgaagacgatcttcgagcgcgtccaggtgagtaggagtgatgatcgcggtattatcgcgttcaacgaatttctccatgtattccatcgtttcagcatgaacagcatttgcagcagggagtaaaatttcacggctcatttaatcaccaataagttgtttcagttgcagataaccgccgataagtttgttatcgacaaaaatacgcgggtattgaaacgctaaactacgttgccttacccgttttgctaactcttcgatacgtgggcgatcgtattcaaagcccagatcgtttttcgcttctttcagaacgggataaaatgtatattctatccctttttctgtcaacagcttttgtgcttgtatacacccgtaacagttatgaagactttcgggaattccgtagatttcgactttcattcttctttccgtatggtttgagatcctgcaaaatacgctttttctctttgcctaacagtttttcgatattctcaacagcggttaactgagtgtgcagatcgaacaggtttgcaatctggtcttcctgcattttcagttcagattccatgttgatttgatagatgctaccaccaccgaaaacatgttgcaaggcgaaacgaagcattgcatcagatttacgtactggtatcggtgcgatgctcaacgtttccaggttagccccgaatgatggatcgatgcggagatcacgcagaggattttcctgtacagggcgatacgtgaatttagggatatccatcaggcacagatccgaaccagtgacaccagcggaaacctcttccggtgtagcgatacgcataacgttttcagcctctacacctttacccagattaacttcttctggttcttctggggtgaattcaccatcttccggcgttacttccttgaaccatttccatagtgatgcagggagttcatattcgtagccaccgtccatgataaatgcgcggtcttcaaactcaccgatcgaggtgcgatcaatcgtcacgtaacctttttcacggatgatgtttgcgatacctgttttccaggttttctctgcaaagatttcaggggatacggttaaaccgtaagtttttccagcgaataattccatgattacctcaaataaaaaaggggatgccgtaagcacccccgaattatattacttacttgccagcaatgcaagttttgcggcggcttcacgaactgcgcgagctttctgcgcaacaacttcgatcgctttctggtgttctgccagcgcgtcttctactgccagcgcagcctcgatgatctctttattgcgttgctgtgcagcaacatcaacggcctgaactgctggagcatttgccggagctttaccagtaccgagttcacggaagaatttacgctcacgatgcatgatatacgggagagtacgatcttgtgtgatagatgcatcaccgtcgccgtcaacagactcaagcaccataataccgttgttatttttgatgtgttgcacaatgcgtttgttcgcggtatgagagcgcaggaaaccagcttcatctaccagaacatacggacgaccagcaacgaaatgtgtaggcatagcttcaaccgttgctggctgtggtgcagcaggttttgcaactggttcagttaccggagcgaggttaacaccaccatccagttcagaatccagatccggtttcgctggtgcaggtgcaacagacggtttgcctactggttttggctttttagcgcgttttggcgctggggctttagccggagcaacttctgtgaagtatttcgcttcccatgcacgaagggtgttcatagcgacacctgctggagcattgaaggtgtagcgatcaccgttacggcttgcgatgtttacaacaccgttcagcaattggtggatctgttttgattgaacactgttcgcaatgtttttgccgttgtcagtgaaaccttcgacatcaaccagcttgtaatctttaccagtttcgaagcgggtttctttggttctcaccgtccacggatgtgaaccgcttcctttggtgatgtttttcagtgggatcgaccacttccagcaatagtcacgggcttctttacgggttttgaaattcagaatcatgatattatctctcatagagggcttgcaatttagtaacaaattcatctttgctacgggctttgattacaacttccagacgagatttggcttctgcttttgcagcgcccaaactccaaccatacacatcaaccagttcacagatttctttgatgattgcgtttttcattttctcgtcctcaagtttgtttcgatgtggatatcttaacagaactaccaaccaggtcaagcgatatttttaatttcgatggaattctttttgaactcaatcattcgctgattatccgaaccgcgaaacggtttcttagtcggtagatccttttcgtaccgtccatcgatcagaacatcaatgaatggtaacagtttagagcgttctgtatcactctgtaaggcttcgagggtgtaacccgtccaaacccacacatctttatcagggaacgtcgcacggacgcgctggagcagttttaagagcgttggatgattggtgcggtaaaacggatcgccgcctgtaagcgtcaacccgtccacatggggatttgaaaggagtttaatcaactcgttttcagtctcttcggtgtatggtgtaccgttgcggggattccatgttgatttgttgtagcaaccttcgcatttatgattgcagccagtcacaaacaacactacacggattcctttaccgttaaccacatccatgttatagatgcggtcaaagttcatcagcctttcgcctctgggaacaaacgggctttgatcgcttcgtcgataatttgcgggaattcattattcacgcgcttaacgatttcctgacgaaccgttacttcgaggtttttggttacgcgagcaataaacgcttcttcgtccgctttgaggtttccggttgcgttgttgattgcttccagcttgattgaatccagcaggtcggcgcactgttttttaacgtttgtcgtgatcaattctttgatctggcgaataccgcctgaattgatatcgaaaatgtcgctgtatgcatagcgtttctgaatgtaatcagcgaactctttatgcacaatcttttcgatttcgtgattggctggcatcatcaaattgacgtgcttgatcaccatgttttcgatttcttcggttacgcgcttaccgataacgctgtcaacaacgttcttgatgacagcggcttgcagatccattcgcgcttgtgttccttctgggaacaggttgttcagcgcctgggtgtctaatttcagttgaatcattttatagtgcctttcttctcaaggatcagttctttgatccgttccacgattacggcgtattcccagttggctaacttctgggtatcacaccactgttgaaaatccttcattgcttttacgtgaccttctttccagtaagtcaccgcgatttcgttgcaaagattttcagtagcagtatttttgattttcatgatttagcccctatagtttgttgtctacaggggcatattataacatcattcgtcgtccgtcaactcttttttgaatccgacataataagcatcagatccattccatgtggaggcgttaacgctacccaacagaacacgacaaggcatattgttatgcgcagactctacaacctgggatactgaatccagcggattgctaccagacacccagcggagcagatgacgatcatcaccgttaatcggatcaacgaattcaaatctgataccgttttcaatcagttcgtgcagaagaaagtttatcgctttgcactgcgctttgttaatcagcataaatcacctaccagatctttatcaattttggtgtatgtgagcgccggatcatacttctccagcacgttctttttgcacgaatggatgaacttttccatcgcacgggctttcatcaatactttgaaatcttcaccaaagcattgtttgattgtgggaattgcacgagccgctttgtcacaatcaatgatcagtttgtactcgccttgtgtcgtgacaaccaccattgagatcagaacacaaccatcaaatcctttttcattgattttatggaagttcagcttatccgtagtgcttgccaggttcgcataacgatccccgcgaatgttgcccggagaactataccgagaaacgttgattgaaggaatacgaatatcttcaacgatatcgcacgacgcaacagcttcaacgaaatcgagaattctggtcgctttgatgacgtgcgccttaaacgaaccgacttctaactcatattcatctttccagcctgaatagtagtcaacagcagggctaatcgctttcatgagcgcttcgggaatgtcaatgtgccatagctgttctgcgtactgtttgcgccagtctggatacgttttacgtgctggtttaaatgcactgttgccgtcttcgaacatcatttctttcctctctttttcgtaaatgtcgtacacacttcttcgttcgtaagcgtcttttaggttgctgtttactatactatcatgcgtcagttcttcgcaatactttttatcccattcagaacacgcatgatcaaccatttcctgaaaaactcgctgtggaacattcccatctacaagaatcctcaataagcgatcagtatcatcattcggtaaagtatgaaagtttttaggaagtttaacatagaagtttctcgcacgagaaatcaaccattcttcaccgcgatcacgttcaatagtgtaatcgtacatagcaaaaaaggggctttcgccccttcctcttatttcgcgttcagggagtcgatgtaagcgctaacgtcagcggaggttacagaagcggcatttttgccacccagcaacacatcaatcttcgtcacgatggtatcgacgcttacggaggtgtggcctacagcggcgatcacgtcttccggtacagtcagacccagactttcggtttgcttgttcagttcgatgatctccaggttgattttgacatcagccagtttgcgatccagttcgacgacagagagatcaatctctttgttcatcccttccagttcttcgatcttcgtctgcaagccctgccagatgttacggtgttgcagcgccagaacataatgactgttggacacttcctgccccgccgccagcagttttttgatctcagactctttaccactgtgaaggtctttgtgttctttgactttctttttcaacttcacgatttcctgaacagcagaaacgcgagtatgttgcagacggtcgatctctttgatcaggatacgtgcagcactgcgccaggcttcttctggggaagtgttttgttcaattgcagtttcaactttaccagtcacgaatgctacgattttcttgaacataattttaccttatttgatttcaaattgattggtgaaccattcaggggctttaacaactttcccctctctgatataaccgattttacacagttcgttggtcaagtcaagtctttttccacccgccatataaaattttaatctgcttactgggatcaccggacggataacgtcgcgatagccgaaatgcgcactacgcaccactatagagagcatacgcaaacggttgatacatccggtatacgaacgaccagtagcgcgggagaagtcctccagcgtaacacctggggcaatagcacctatcagatcaagataatccttttcaacccagaaccgcccgacagaacatttcgatacaccctcagccatttttgcgtttgggtgtttctcgtcttcgcgcttcttcttgtcctcaaggaacttattgaaccgaatttcttcgagtcggttttcccgttctacccgcgcacgtacacgggagggaaacagagtatcaaggattttcccgatcatatcgttggctttccgtttggtagtttcagatcgaaaggaacattcacaggccggacggtttctaattggagatattgttccatccccacacgcttaccacctactttgttataacggatgttctttccgtcatagcctacagcctgtgaaatgtagtagtgtttagtttcgcgtaaacactccatccattcttgtgttccggttttgttgcgtacccgcgcctttaatggaaacatcattcaccccgtagaactttcagttcaccagacaaacgctgtagattggcggttgcagtatcgtaacgcttttcggtgtctttcagggtagtttcccgcgccttacgcaagaatttttccagatcaccaggtttcgtcaccagcttaccatctacgtaaattcgtcccagcaggtgagaacaatccagcagttgttgtgcgtcggctttttcaacagcaggtttaagcgcgacaaactttttaaagaatccgcgatcctcgttatcaaacagatacgaatcttcggaataccatgttgtgccattggcatcaacgatcccactaacacctttccggttgcagtgcgttaccttgataggaaacacgacagatgatagttgattaggcgacagaggactaccacgcaaagctaaattgcggtacaccgtcccaaaactttcttcgtcacgaaattcaaaataatcttttgtccagtacatcattttcaatacctcatagtttcggtatgtgtaatataacaaaagcccctcactttcgcaaggggctttttgattaattttgatgcttagttcggtgcatcatttctttgttcttaccttcgttgaaaccacggacagcaggagcacccaaataaccgcatgtacggcgcgtgacgctcattttaaccggatcgtgattaccgcagtgcttacagtggaaaccttcttctgtaggcgtgaactcgtcatcagagccacatacaaagcacttatcgaccggaaggttagttccgaagtagtccagtttttccatcgcataatcccagactttttccagggcttgcaggttgtttttcatatcagggaattcaacataactgatatgaccagcagtagcgatgtaatgataatcggcttcatagtcgattttctcgaacggtgttaccttgcggtcaacgtccagatggaaactgtttgtgtaccagcctttatccgtgacacctttgacgcttccgaacttctcaaagtccagcttacagaagcgatggcagagagattccgcaggggttgaatacaggctgaaaccatatcctgttttcttcttccatgcttcggttgcagcgcggaggtactcaatgatcaatcgacctaatttctgggagccgatgcgatcaaatgggtgttggcctgagccaaacatcaacagcgtttcatgcagtccgatataacccagactgatagagctacgcccatttttgaacagttccagaatttcatcatccggtttcagtcggacaccaaaagcaccttctgtgtataggatcggcgcaacactggctttaacaccgcgtaggctttcgatacgagtcatcagggcttcaaaacacagttccagacgttcatcaaggatgcgccagaatgcgtcgtgtgcgtcttcgttttcctgtgcttccgcttcaatagcgatgcgtgggaggttgattgtcaccacacccaggttattacgtccatccagaacttcattaccgttatcatcatgccacacgctaaggaaactgcgacaacccataggagatacaggaacgctagaaccagtaatagcgcggttattagccgaactaatgatatctgggtacatgcgtttagaagcacattccagagccagttgtttgatgtcatagttgcgatcctctggatcaaggttgattcctttttccatgaacataaccagtttagggaataccggagtgataccctctttacccaggccgcgaatacggtttttcagaatcgctttctggatcattcgttcaaacatacccgtaccagtaccgaaagtgatggtaacgaatggggtttgaccattggcagtatgtagggtgttaacttcatattcgtaagactggaacgcatcaaaaacatctttttcagtcttttccatcgcgtatgtacgatcgccagaaataccgtatttccttgcggttttttcgtgtttttcatacgtcatacgagcgtatggagccagcactttatcaacattcgcaaaggttgtcccgccgtactggtgagaagcaatctgtgcggtgatctgcgccatgagagcggtagcaacaccgatcgatttaggcggttcaatgtccgcgttacccatcttgaaaccgttctccagcatacctttcaggtcaaccagacagcagttagtgtaaggggtgaacgggctatagtccagatcgtgataatggatgtcgccggagtcatgcgcttctacgatatgtttcggaaggatatgattacgggcgaaatgcttcgctacaatacccgccagcaaatcgcgctgtgtcgggaatacccttgcgtctttgttcgcgttctcgttggtgatctctttgttggacaggttcaccatgccggagatatctttgaacagcttacttttctgttcacgggcaatatcgcgatcgtggcgatattcgatgtatgcacgggcgaccgctgggttcgttttcatcagggattcttcaacgagttcctggatacgggcgatcttcattgcgctaccatcgcggatctgattgtactgaaccagcatgattgcggcatcagcatccgtcatagtcccgccagctttttctacagcaatacggattttttctttatcaaaatcaacggttttgccgtcgcgtttttctacacgcattacatttctccaaacttaccaaagagttcttgagatttgcgaattcttgcgttgatagcatcattcaaatcgtcatactctccgatataaattgattttccattgaattttattttcgcaacccatttgttgtatgtgttgcaccaatgtacgcctttatgtccagatttattatttctctgaacctttttcttcatgatgttttgttgttgtgtaatcttttgtaggttcaaaaatccatcaccaagttcaaccccatgaacatgatcaataacatacggtttttctggtagtgtaccatgaatcacataccatataatatgatgtcggaagaatttcttccctttgaaccctataacagtatacccgtttttatcaacaacaccagcagattgacctatacaaatttttcgatttgttggcttagtccatgtaacaacaccgctgcaaatgtctacacttacgcacttgagaagttcatcaagttccgtatatttttcattcatttagttgccttcattaattgctttctatattttgcggttaaggctttgcgttcgtctttgtcggcgtattcaaagcccatagaaaccatttcggcaatcatatcaggtttggtaagtcttgaaaaccattttaccttatctggtatgaatttgtcatgaatacggttttcggaataatcttgtttcagatatgcaagcaagttctctaaccactggatgtaatcaacatcacgggacaccagaccggatctgttgaatttgtgcttcacaataccttctgtaccgttgcataggttacacagtaggccgcgcacacgtccggcgttttcgccgtctaaagcatggtcatggtcaaggtgatgtttctcgatctctccctcaagaggacgtttgcagagagcacaacgcccaccttgtttttcaaagagggcttgcttgatagtcgggtagtcttttttggtaattcgtttcgtcagcataataacaccattcagtaaggtgtcattatttattacagggtgcggacgtactcgcgaagttggtcgaatccgcctacgtgtttcccgtcatggaaaatctgaggcatagtcatccggcgcgtaccaaccagggcttcgagttcgtcgatcaccgcttcattcagcacaggtttaccgtcttccacggaatccgcaacagacacgaactcatacggatgttttttcgcgtccagcaagcgctttgagttcaggcatggagcgcagttatacacagaagggatatagccataaattttaaacatgttaacctacattaaatcgttcagtgttaaagggaatgtatttacgtcgcgtttctggtagttgcacacgtagacttcttgcgttttgttttgctcgtaagagtcggtatgctggcctaacagatactttttatccagattatgaacgcggtatttctgcatccattcaatcaggatatcattttgttttccggcatggtgagtcacgttggacagtccgaacatgattccttcgctgtgtagttcatccaggaaagcatataactcgcgttcgcgatcttcgttccagaacttgttatacactgcatcggtgatcaggtacggcggatcacagtacacgaaatcattttcacagatatcaatgtcacggaatgaaccactggaaaactcaatacctttcacattctttttgaaatgttcaaagcgttttactgttgcatcgttgagcgtccggcatccgaaattagcgttgaagtcgcctttgtcgtttgtccggttaacgttgctgaatgaatgcaggatcaggacatagagccataacggatctttgttctggttgtattcatcacggaatttcaaatactcttctttcttgtctttccccagacccttcgatgcaatcaattctcgcaccggagacaggtcaggaagcgttttaagacgctcatacatatcaatcagcgtcttatcgtaatcgttgcttagaacgggtttagggacgtttaacgacacactaaggccaccgcaaaaacaatcaatgaaacgcatgtatgaacttctttcggggaacagcttgaagagttcaggtaatagcgactgtttgttgcctgtataggggataacacccaaataactcatagaaaagattccagattgttaacgtatggctgaacacgaagaatagaatcgtgataataattctccatcagttcgaagcctttgaaccgtctgttggttagtatcgacattttcatcactgtaccagagccagagaatatatcaagaaccaagtccccttcaaccgtccacgttttaatgtgatcttctgccagttgttcaggaaatattgctgggtgtttgaatgcaatctcgtccttcgttgagtgatttcgccctacagcgtaataccagatattacccttaattttatccttgccaacaggtttacgtttcttaccggaacgggctgaacggttcttttcgttggtttcggaaaagtagctgttttgtcgtgcggtttccttttcagggaacttacacggaatgcggatcgggttgaatgtttttggtgcgccttttgtccacacgaacatgtattcaaagtcctgttcgtatcggttatggttcttcggtagagcggttttgtgatagatcatcgtatcatgcaaccgaaaaccttgttcgagcgcgtacaaggcttgacggaaagatgtacccgtttcactaccgttgatagtcgcgtcacccacaacccacacaaccacaccaccaggcgcggtaacgcggtacagttccgatatcaactctttccatacgtgttcaccccagacatcaccagagccgttataatggcgcaagttgtcatacggaggcgaagttatggtcaagtcaacagaaccagattcaagctgtttaatcagctttacggagtcgcctaaatggaggtcaaccccttctttgattgtggtaatcataattcaccaagtcctttctcaaataaggcgatcgtttcgtacttatacccacgattcaccacgaagcaatgattttcgcctaatttctcaagcattgcaatagcacgatgttcatcttttttatctttcagcagataagcaattcgaacaacctcttttagtgtcgcgttgtccacctgttccaacttgaacccgtagcccaccaacttacaaaaaagccccttgcgagcgacaaggggctgattgttgtagaagactactgatccgttatcgttggcgcggatattaaatccttgctcgctcacggataacccctactgtatcggaggtgtttaatacaccgttgtcgtaatacgtaatcatcgcatcacgccacccgtcaggaatctcagtttccagagtgtcgattgttttgaattccacaccgttagtgatggtcatcagcaaacctttcttactctgtttccattcggaacctttcgggcatttgtaaacgcctttccacacaccattcacgcggatagcgcacagtttttcagcatacttttgagtgtcgcgggtaacttcttgcagcaaaccgccgcccataccgaacgcgatgttctcactcgcccacttgttcgcttccatccaacttaacacacggttgattgtttcaggcccgtggatctcgtcgccctggatgattcgaactgaattatgcagaactttgtaacctttgctgtttacggtgtaaccgaagatttcgcccagtttacgcagggtgtacatgatgttatcaatcatatcaccggaatcaggacgaacaaccagagtaccacccgcagcaatgatttgctctttatattcagcgatgcgatctacagcgcctttgtagtcccaggaatcgtacacacaagcgtataaccctgtaccgaacatttcgatgctgtttttgtatgcttcgtcttcgttctctttaccgtaggaaatcgtagtcgaatgttcgcgagccggaattgaaacaccgattgcttcgacgttttcaacttcatcaaacagagtttgatagtccgcaaacagactgattgccataatcataccttcaacggtatcagtcccgatgaagttatagaggtgtgccagcccaccaatacccgcagattcagcagaggtcgcgccacgcgccccgaaatcatgcagacgtgtacccagtgtgatgttatatgcttcaccagtcaggtcagaagtcatatcaaggtaatgagccagaacctttttacactcacgcgatagcgttgctacagatgacggataccagataccgcgaatcgtcattgtctccagccacccagccaaccatgagaattcacgttcggcgtacacagtcgcaacggcatttttaaccggaacaaccgtaccttctgggatcgcacggaaagtaacagggacataacccagttctgcgatcttcttccacccttcgtagttgaaaatctctttcccaaagtgcttacggtaaagtacccgtgccaactcaacttgtttcatggtaattggttcagcaagaacccgcgcaacgaagttaacgccagcggttactacttcatcaaacttaccaccgcgagattcaatatagaacatcgctgcatcagtgccttgtggatactgcaaccagtgggacactttgtaggaatcagttgaggtgatcaggctattcagttcattaaaagttttcatttaaacgtactccacgttttgatttaaaagatacgatccaaacgttctggatggatcgtgttccagtatttactcttacagtctttcctggattttttaccattagagcagaacaccttatgatatgtcgtcttcttgtgcaactctttgcacgtaggacaggtgatcatggttcctactttagcggcttttgcaacatcgtacaattgtttgatatccttctgccgctcggacgtaatgacacgcccgtttacttctttgacaaccgtttcagttcgaatcgaaccatcggaatatttaacaggagttttgacttgcttcggcgcatttgcttgttgcaaaagccttagagtttctcgacgtaaattatgaccacaaaaatcatcgtcgtcatcgtcgtagccaccccagctatcaatatattctgcttcactcatgttcgatccttagttgctggtcagtaagaagacccggttgtcgctatagtcgatgtagcaatcccaccaacccgcacagttaacaccatctttttcaaggcttatgattttaacgctggttgcaacgtcatcatattcataaaccgcacccagttcgttcagcattgcttcaacgttagcccgtaagcctttaccgttgtgtgctacaccattcagtgccaagcagtagccagcgcaagtaggtactaatttgatttccatgatgttttccttttgggttagtgtcttgtctacgggagctatattaccacactcataactcccgtcaacaagtttttcgaattattttcaccaggtgatgtaataagtcagatcgctatatccgtcacgcttaggatcgctaaagttggtatgaacacggcgcgaattgaaagaggtagcgatacgtgcagcttgcaggttacgttgggtatcaaacgtaaacccttcttccgccagccattcacccagatccgcatatgctttttcggtacattcctgatccataaccttaccgataaaacgtttcatatcaaaggtatatgattgtttagtcggatatttcaggacatactcggaaatgtctttgcgggatgcttcgaccattttcgcgttgatttcgtcaaccagtttacgcgcacgttctgccagtgtcgggctacgtccacagcggggatcatcttgcgtttcgcgtttgacccactgtgtcccgcttcccgcctgtgcgttcacaccgattccattgatttctaccattatgtttcgccttttttaatgcctcttcaactgagaggcgttcgtaattacgtgattgttcgggagttatcaccagagaaaatccagagtaggaggtttagtgttaatccctaaagtatcgcagacttcatccagaactttttgattccaaagattgaacgttggaaccttatacaatctggcaagccttgcagcgatcgcagtaccacctttaacgcaaaaatctttctctaccgcccagaatagaacaaaatctgtaggtttgtccagattttcggttaatacctgcattgaattgcgagcatatcggcgctgtacccattcgttttggttgtcgaagtgtccagctacccttctcgcttcgtcagcggccttgtacgtgtcgtattctgtatagtcgatgatatccttgccattcgaatacaacccgttaaaaccgttctcagggaggattatacgccgtctttctggtgagtagtcaaacatgaaatggctatccattccaggagcaccaccagagtaagcgaagatcccccgatcacttaaagcacgtccaatctttatggctatactcgcgatacgttcagggggttcacggctaccgatcagggtagccgtttttgcgttttcgagaacagttttaaaattcattgttcaggattgcgccccagttctcacgaaccagatttgacgcttcgttagtgaaggttttcttcgccagcgttgggttttcgaactgttccaggaaaggcccgtagttacgttcgatttcttccagcgcgtcctgtaccgtaagccccatcacgcgaccgaaatctttagcggtgagattcgcgctgtcaattttggacagaacgtttttcacgcggttttcagtcaggtagcaggtgaattcgttcagcttcactttgtctgtttctgacagttcagaaggagcattgaagcggttcgcttgcttgttcttcttctctgtgaacttcgtcgttttgcatttgattgcaacgcgttcaccgttcggcatgaaagcgggttgaacaggcttcatcacgaaaccttctgcgatgttctcaccttcaccatctttcagcgtcatgaagtttttgaactcaggttcaacgccgttctttgcagggatcgcaccggagttcgccaggttaaccaccgaatcaaaggtgataggcagtgtgcggatctcgtcaaacgtaccgtatgccagcagtggagccattttcaagccaacagcaacagcgtaattcgcaacaacgttatcagggaggaactgaccattgacgcggatatcaaatacgtagaaatctttttctccgtagtcaacatctttctgtacaccacgccccgcgaattcgccgtatacctggatcaccagttcatcgctatactcaccgcttaactgacgcgcagtagagatcatttcccacatcttacgaacaggttcggagtatttcgcaactacgggttcgcaaccgtagaactgttcagcagggagaatttcaccgctacgttttgccggaatgactttgataccgtccgaagtgatcaggctaaagttagccccgtggatcttttcacgcgctacccacacgccaccagtcaaaccattcatgatcacaccgttgatgaatttaccttcataatggttagtcagagaagaatatttcacaaacataattaacccttgattttcagttgtttttcaatttgatacgcggctttgcgtaacagtttcagttttacttctggaaggatcacagaacccttcataaacgcatcgagatttgatttctcgctattcgcggcgctggttactgcgatcgtgttttcaaccgtgtatcccagagaagcgttgattcgttccattgttcgggagtcagagcaaccgcctttgttgctaaacggtctgccggagtaagaacatacgggttcactcattagcttcgcccagtcgcttaacgtcagagcaaattgaaggttgcggttacgcgcatcatcgtttttactgttgtatgaacgagcgacacgcagatcgaattcaatttgctttgcgcggcggcggtgttctaactcagcaggatcgagtgataccatagtttgaactttttccggttctactggctttggttttgcttcaaccttcaccaaatcctttttgatagtcgaagttatcacgcccgaccagcgattcatcattgaagacatataaaccccttacaccaaacccgcttcctggaacgccagcgccatagcgccgttgattgctttacgtttgttatctggacgcggatcgcgtttagctttggtcttaggtttacgctgttcttcacgatgtttgttgatatacacacgacgcagaacatgtttcacttttggattttctgcgcggaaagcacgaattcgctcaatttcctgaacaatcacgtaaatgtcgccgttatcgagcatgtgctcacgggcgatctgtgcatagcccagtttcagatcattgaatttgaaatgaatctgtactttttcctgctggctaacttcgctgatattacgctgaacgattttcatagttactttcctttagtagaatcaattttacgaataaactctaacacttcggcatttctgctgtcaacatttttaagaacaaaagttacaactacatgaacaccggatgcttcgttccaaccatcagcacacgggatcatcagatcatccagagtgttgacaaggttttccatatccgcagggtgatcgacaaacaaagtttgcgtttcggtgatactggctttgaatcgtttcccgatctgtgcttcgagttcgtccagcatcccagcagataacgcggcgatgtcgatgtttttcattccaccatatacaacatgaaatagtttcatatacaactaacctcattttcgtatttttcgcgttcgaaacagtcgggttcgttccagatctggtcaaactcacgtttcgtcatgatatagccacgggcgattttgcgagttagatctgaaccgatcggagcataccacaaaatcaatttacacaccattccctgaaccagacaatcatacagccctttttccagggtgcgtacatctgttacgctatcgactaaatcgggggcacttcgttcaggatggtctttccactgactttcgatgatgtcgtttagttcacgatggaaatagatccacgattggaacgatgcatcaggcggatttgacttgcaaccagcaggataaaattcaagcattttgatcagcctcattcgcaatacagatcgccataaaggtaaacataacccccaacgcaaccatccagatcgcggttaaatccccatacaaagaagaatagccacccatcacttcaacgcgatatcccagcaagaaaacgagatacgctaacaccttatctttcataattcctcacagaaagcccatgcagcatgataaacgcttgcgcctttgtcatcgttcatgcataccacatctaccggacacacaacccgatacagtaccggatcaccacctattgaacgtgcagcccttccagcatagatacgagccagcccgatatcagcagtgaagaaaacacgatccagatttttctttctgcctttttcagacagagtatcagaatcacaaggaggcaacaacatgctttcgattccggcagcagtacatgatccgtgatagaactcaacgaactctttgcggcagtgaatggtattcatggttatctccttgttttcagagattacagcttatcgctattcgcccgacaagtcaacaaattctttttcaacgtcttcttttgttctgaacaggtaatcagtaaggctacctgtcatcaattcgcgagttttagcaactgaacgaacacggcgttcacgttggctttcggcatcaccaattccgtgacctggttcccacccttccatatccaacataatgcgcgggtgcctcatcacacgaatatcgtttccatatgaatagctgttatattgcccgaatacaaatcttttgaatttttcgtggtgaacatcatcaacttcgacctgttctccgtagtaaacaatttcatcacagaacgcagcaagaacaagcccaccagagttttgaattttcaggattgcatggatcatgcggtgacgtgcttctgcaattatatcatgagagccaaatccaatctcttttgtcccgaagcgacagaaaatagaataggtgatgttcagcaggtatttcgcgacgatttgccattcattatagataggattgggattgacacggtatgctgatttatattcgcgacgcagttgaagaagtgtttctatgactttagcaacactccacccgttcggataagtcgaatcgttgcgtttagcaacagcaattgttgaatttgcgtataagtggttgaaagacattacgcggacgttatcgacgtaaccacgatcgcgatcactccatttgaagtaatcccattttggatcacaatctggacgcatagacggggtatgccagcgcttgaaccccaagagattacagaaatcgtcaatcagggtatcgcgacgggatttatattttgactggtcgccaagagcagcggcgttgatgaattcatgcagttcatttttcataattgttaccttatggttaaagttcttccggcttatccgtcgaacaattgcactataaacgcactcataaaccgtgtcaataaatacttttaaataaacacctggagttctaagatgaaatcattcaaagactttacgagccttgatgaagcgctgatcaccttcggcggtaaggcttatcctaaatttggtcaggtagtcatcctggctggcggtgcgggttctggtaaagggttcaccctcgaaaagctgttaggtatcgaagggatcaccctggacgttgacgcactcaaaaaattggtcatgggtagtaccaaactggcagcagagatcaaagcgaaaactggtcacgatgtcaaaacaatgaacctgaaaaacccggacaacgtagcaacactgcatcatgtgatcgcagacgtgttcaacgtatccaacaaaaaccaggcgcgtgtgtacgcgggtatcgcagcagcaccggaagaccgtaaaccaaacctgatctttgacgtaaccctgaaaagcatgagcaagctggcaagtatcgcccgtgatgttgaagcgctgggttatcagaaagaaaacatccatatcgtttgggttatgaacgatgttcatattgctatgcagcagaaccttaaacgcgatcgtgtagtgcctaaagaaatcctcatggatacccacgaaggggcagcgctcactatggcgaagatcctgaatatgggcgactctctgaaacagtacatggacggcgatatctggatcagcttcaacaaagtaggcattgacagcgaaatcaagaaatctgacaaaggcggtatgtttgtcgttaagtctaactacatcaaagttaaggcaaaaggaaagccgcagaaatccattgatcagcttgataaagagttagtggcgaaagttgcagcatacgcaccgaaaactgatacatggggttgacaataggaacatatatgaatatgatgcacacacaaaccgaggaattgatatgaaaaagtttttgttcgatatggatggtgtactgttcaactgggaaggttcttttgttccgatgtacggtgacccggcgagaatgccggaagaagaattgaaaaaagcgaaacaggctatatcacaaactgacttctacgaaaatctggaaccattacaagagggcatcgacctgttctgtcatttgagaactttaggtcaggttgcgatcttaaccagcgtagggaaatacaattccgatgcggtagcagaacaaaaaagaaaagcgttgatgaaggtgttcggttatctgcctgaattccactacaccaaaagcagcggagagaaagcagcatatgcggacaaaggtatactgattgatgacagggcaaaagctgtgttgccattcagaaaagccggaggtaaagcgattctcttcgttggtagcaaagaagaagcattgaaagaaatcagaaaaattgcataaaagaaagggaaccattgcggttcccttttttgtttatggtgtgtaatccgcaaaggagcggttcacatcctgaatagtgatgttcatatcgtcgttcaggaaaacactacgatatttccctgcgctatcccatgcttgacgatgcttatcattgcgggagatcagagggcaacggtaagcgtgggctttcagttcgttcagatcccgacaagtccagaagtctaaacgtacaatacccatctgtgcgcatactttatccatgtacgcgattttttgactattcacccaggacgggctttttgcttcgttgacgagaataaaaccgacttcgcgatcgcgataggtcatgccccatttcatcatatcccaacccaacacctcaatcgccagtttttcatagaaatctgtacgaaccagggacgatacagcagcttcatattctgcatctgtcatgttttgaggacgtttgccaaatttggcttcgattgcgtcgctgaattttgcgaatacatcattgaattcaaatagtagcatttttaccttcttagttgttattatggtgcaggtttaacgtttaccgtcagagttgcagtaacagatccagaggttgctgttacgacaacatcaccttcactaaccgcatgaagtttaccaccaactatagaaccatgaccggaagagtcaacactcagagtcattgctgtaccagaaggatcaatggtaaacagatcagttgcagccagatccgcatcacctactttgaaatcagcaggagcggttttcggtgtaattgttacgacaggatcagcaggagtaaaatcactcagcttatacagataaccgttacgggattcgatgaaatcaacatcggtgtaatcaatatacgcttgtttcagtgtgtcgaattctttcgcgtatttttcttcggcataatcacgccagtcttcgcttgcagcattcgcagccacgatgatatcaaagatccaccacggcagataggtaaagctggtgttacgccacgggatcgggtgtaccgtagtccatttttctgtagccattttcaaaacctcttagtttttctctatttagagaagtaaaattttgccgtcacaagacggacatttatcatattggttcacgcgcccatagccgttgcattcaggacagaacgggtttgttacaccgaacacattacggatcgcgtaagtggattgttcttctgtcagccccacaaacccatcggtattgatgaaatgttcactctgttccggcagcatatcggtatcgtcatcaaggataaggtaattcttacatccgaaggtgtcgatccatgctttgatttcatcaccgcgtcctgcttgtcggtctgttagattcgtacaggttttcccaatgatgcgatacaatccccacggatagaagatttcccgtagagtatgggttgtgttgccgatcctccatgtagaggaaatgacaatatcacagttcgcatgatttacgatccggcgcaggtgtcgagcacattcaatgtccatatgctcaccaaatttcatgcaccgcatattatttagaacgccgtcgatatcaaggaagatgacgtttccgatctctttaccttctgataagtctttcaggcattcgtgatttaattcagtcatattttacctacaaaaagggggctacgccccctttgaattttaatagaaaccgcgagcttcgttatccaggcgacggtctgcaatcatgtgcgcttccatttgacgagaaacataatcaggatcgcattccattcttgcttcttcgtagttgtcccaagtatcagcaacccattttgaaccattccaacgagcataaccgggttcagaaggaacaggataattagcttcggcagcgtgacgcagagcttcaccaacagtatagtaaggagcatttgaattgactactttcttcactttaccatcaacccaaacaaacagaactgggtagtaagcgtttttcatcatttcgtttttcattttgctttccttcttcactgcgagagccattcccccgccttcgagtacaaatatactttaaacgagggtatgtgtcaacaagttttttagcaaaaagtgctaaaacttaaatgtttcgaatcggctatttctggtttcgcgaacacgaacttcaccatcacgcacgatatagaacgcaagtgatttgattgtgtcgattgcgcttgcatgtggacagctatcaggatctttgtaccagtctggggtttgcttaatccagtcatagatccaccacggacaggtataatacccgttagaactcgcagagcgccccatcatgaagattgttgggctaaacccttccaaccataccagttcgcctttggactcgtcagaagcgcttacaggagcttctacgacatcaggtactaattggatttgatcggctacttccggtgcgacctctttaacgtactccataaaatccgcagaagcatcaataaccacatcaggaatgtttggggcttcgatgacaggttcacccatagtcacctcacctttgtatgcgacgatttccggttcaggggaatcaatcagcagttccggcttttcttcttcatccggtaaagcagcaaccagatcagccagcatgttatcaaaggatttctgtttgttcagcttaacagcaaacacgttcatagcataatcagctaacgcgcctttctgttcttttgcgtcgagggtacggaacccatcaaccttttcgtaatcaatgttcattggaatctccagtgtttattcaatatttagagcataaatacatatatactttgtacatagggtaatcatagtggatattgaagtcaaatttttaaacacaagccacgtacagattcaggcagaagcaaacattgtctatgaactgcgtgactatttcagcttccagcccccaggctatcagtatcaggccaaatacaaatatggcgggtggaacggttacatttacttgatggactacaacgggaaactcccgtatgggttagcctatctggtatccaaattcgcagaatcacgcgggtattcaatctgggttgatccaaagatccacgaaacagaggatatcacgcaagaagattttgataagtgggttaacgaacatccggtttatgacggcgacaaacagatcgacccgtactggtatcaacgcgaatcagtgttccacggtatcaaaaaccgtcgcggtgttctgaacctgccaacatcagcaggtaaatctctgattcaggggcttatctctcgttggtgtctggaacattacagcgggaaagtgttgatcatcgttccgactaccgcacttgttgaccaaatgatcgaagacatcgcaaactatcgtttgttcccgaaatcggcaatgctgggtatccgttcaggtacagcgaaaaacagtaatgcactgatttacgtttctacctggcaatcagcagttaaaatgcctgccgaatggttccaacaattcatgtgcttgatggttgatgaatgccacctctcaacaggtatgagcatcaaaaagattatcgacacgatggatcaatgtatcttcaaactgggtttatccggttccctgaaagaagggaaaacgaacatgatgcaatacatcggtgcgttcggtaaagtctttaaaccagttgatacgcgtcgtttgatggatgatggtcaagtcaccaacctgaaaattaacacgatcttccttcgatacaaagaagaagaggtcaaaaaattgaagggtgcggactaccagacggaaatcaagtacgtaaccagccacacacggcgcaacgcgtggattctaaaattagcgctcaaattagcccgtgagaagaacgaaaacgcctttgtgatgttccggtacaaagagcacggaaaatggctgtacgagcagttgagcaaggtttacgataacgtggtgttggtcaatggtgatacagacattgacgatcgtaacgaaatgaagaaaattgcagaatcgacgaaaggtttaatcgtcatcggttcgatcggggtactgagtacgggtatctcaatcaagaacctacaccacatcatttttgcgcacccttgcaaatctgctgttgtggtgaaacagtctatcggtcgtgtacttcgtaagcacggatcgaaagcgctcgctactgtatgggatatcgttgataacctggctacgctgtcaaagtctaagacagccaaaaataaatacagtgcgacaaactacggtatgaaacatgctatggaacgtgtgcggatctacaatgaagaacgattcgactacgcgatcaaacaggtagaaatttaagaggccaaaatgaaaagttttactacattcgtaaacgaagcagcgattgatgatttcatgaataaggttgcttcgtgccggacactagaaggtttgaaagaacttgaaaagtattacaacacccgcgtgaaagaagtcgaggttgcagcatccgatgacatttcaatgcgtgacgcgatcaagggacggcgagaagaactgaaagccgaacttgaaaccggagaagaagagaagttttaaaaagaaagccccaaccgaaaggaaggggctttttaattttgaagcatagttgatttttaacgcggtgtcgtcaccgctattctaaactgcgtaagctgattaatcagccagccatgccccacaaggggtactgtgacacattcgccgcaacatgcaatcgtatatttgcggggtagtcaatcgtagttcgtgccgttgcacactgttagcataaaggttccaggttgagaaaaaatcccaatcacgaatatatgttgcattccatataggccattaggtttatccgattatgaaaatgcatccatcggtaaacatgcccttgccctacaattatatttactgctataaatctgggcgttcgtcttcgatacaaccgctttcaaacgaaattcgaagtgcatgaaccctggtcacacattcttccatcaatcccagcaaacgaaatacttcgttaaagtcgatttttgaatagtctttcatattcacacctacagcaacatttgaacttcgttcagatcgtcggcttcattgataccgcgatcattcctttcgttgagatattgcaaacatacgacaccgcagatcgggccagcatcattgacaaacgccgtgttacgggagttcatcggttgtttgcacacaacgcatttacaatcaaattcttctgccattttatgcaccactctcaagtttacggatctccaacatgtttttgatggagtagcctttgttcttaacgatatccagcgcttttccggtaaactctgcaatcagttcgaagtattggatcagcttgttaacttcaacggtcttaggatcaccggagatagcaattttgatttcacccgaaccagtgtaaatgacatcggtcatttcgctttcgtgtctaccagtgtagaacagtaaccgatcttttacaatcgcttctttcttcgcctggagttgaataagttttttcttagcattcgaatgatatcgaagccattttgaccaaatcttcggaatgtctgctgattcgctttgtaacttcaacggatcaatacgcatatcctcttcaagttcagcctgtagatcttcaagttttagttcagccatgtatcacctcaaaacaaagtaacattataaccagttagatcaagaagtcaaatctacgagcgaagcgagtacatgaacgaacgtagtgagtgaatgttggttaaaaagtatacggaaatgtactgttttctctatatataaaatataaatattataaacagtacatcgtacttacccatcactcacttcgttcgtgaaaactcgcttcgctcgtttgaccttatagatctttattactataatggtcttctcaaaacaaaacttgttaacccagtttaggtaacttaatacctacgatctgacttagcttagatttaccagcaagggcagaccaatcatcacctttgatcaggcgatcagaatcactttcagcagtatacgggttcacagaaagaccgtaacgcatcagaatagcaactttcggttgcagtgatgccggatctacggatactttgattgaacctgcttcgtcagcttcggtatacggagcgaagaacagagagcctacgtgatccatatcacccagatcatatttgcagccagtcagcatataatcgaacgggctgtttgtgtctgtatagacataataaccgttgttcagcttacctgttgccagtgggtgttgttcgtcggtttcgtgcatccaaccagacgcagccagaatgcctacaacacgcgctgttgcgaggacataggtagcatcaaatgaagtcgttctattcatttcctgccccatttcacacgctaattggtacaggatacgacccaatgctggagcatccttcgcggtgtatgcggtagtaccgtcaaaaataccatccgtaacgagtccatcgacgttgtaacgtttggaaacggtgatcagtgtttgaataatgtctttgttgacttcttcacttgccacggttcccaggatgtcttcgatcaccccatcagcttcgaactggttagcttccaaatcctgcatcagttcaaccgtcatttcggttttaaacttacgcgagcgtaccggaatattccagcgatccatctggaaggaggttgacgcgatatcttcactggtttcgtatttcgaagtgtcagcggcttcgctaaccaggcgaatcttgctttggaacacagctttcatgatcgcggtgtctttgtcagtatccagagtgttcagggtaataggtgcaatcacctcataaacaacgtcagtgccgtcatgcttgaacaaatcacctttaacgtaggctttagtcagatcgatttcgtcgatgtctgtacgtccagagattcggcctgaataggttgcagcactggagaaagtcatatcaccgttagggttgcgatagcgaacaccgaacagtgttgcaacagggagttctgtttcttgtacagcaaccagttcatgatagatcaggttgttaaccgcgcgagtcaaagaaaccagttctgggcgcgtgttctgtacgttgatgtcggtcgtgcctgttgcttcgttgataactttttctcgtttaccagacggaagcgcagactgacgcatcaacttgtgaattgtgtagtgtttatcactcatttctatggttcctgaattagaggattatattgtgtatttatgcaacaaatttccaatcaggatacttgtcactttttagcctataatcgaggccagaacgggacatacccaactcaatagcagcatccgtcccacttttatatatgacaccatctatagacacagaacgacttattttagccttgtgtgcctctgagagcgtcgatccggttctgtcgaatgcagaacccttatacatcgctttgatagtctcagaacgcttcctgtttgattcttccgattgtcttttacctgtatgggcttttgacatacgttctcgcatttctggtgtctgcatagcttttgatgtattttcggaaatcagcttacgctgttcataactccatccaattagagccattggagcacctttaccaccaataccagcgttgtatgtatcaggtcggtttatgaattcaatattgacaatttctctttctttctcatacatttcttcgcgggtatcgaacacatggaggatttcttttgtaaaatgttccataccgtatttcttttgcgcttttttgatcgcaatacctgaacccatatacgaatcattgatatcttcggtcgaatgagcaccaatatagattttattgttcagtgtatttgttattttataaatgatatgtttcataatatagcctcgatgattttcactatttatataaacaaaaagggaacccgaaggttccctttaaaatcgttatttttcaataacttagaatcaaagtcccttcacccagaccttacggaagtatgcgtttttaccgcacatttctttgctgatcataccagaagtgatacgatctgccggagcctgagagcgagagttcgcaaacgggttgatgccgataccgtaacgagttttgaagcccattactggctggaagttcttaggatcagaaccacgcagcggagtcagcgcaacgtatggagcgtagtagataccagcatccatttcgttatcacccttgtagcccacggtgaagtaatcctggcgagcgtactggtcgatgtacactttgtaagtgccacccagtacaccagcgaataccgctttagtggtgtctacgttcagagttttctggagaccctgacctgccggagtgatgccgctgtcgatacgagccagagcggaaaccacgttacgagaagcgatgatgaagttaccagcaccacgaccagtttgacgcgcgatttcgttcgcttctttgtcgatctgaatcagcagagctttatagctttcaccagcccaacgagcgccgcgaatatctactggatcttggaagtcaaacgcaccagctttagagcctacggtctgggtgaaaccagttttaccaatctgcgcggtgtagttgatcaggtcaacgatttcgcggttgatttccagcatgatttcagttgccaggattgcagacagttcggcgtcagcgtccataccgtgtacagcgcgaagatcctgcgccagttcaacggaatactgtgctttcagttgacggctacgagcttcgataacctgtttgtcgatacggaaagccatttcgttccacgggttagcgctggaaccgttgaagttttcctggagttctgctacgctggtagccataccttcggaaatttcagccagagtgcctttctcgttttctgcgattacagcagcatccagagcagcagcatcagcaccagttacggttacactgccggaggtcacgttctggaagtacgcaataccagtttcctggaatacgtgcttaacgatagcgccggaagcgatagcagtaccggaagcgatagcagcaaacgcggtgtttgcaccttcaccagaatacatggtgtctggagcgaacatcggatggaatgcttcacgaacgtttgcaggagtaccgccagccagaggatctttaccgtatacagcacggagtgcgaacacctgaccagtagggccagtcataggctgaacaccgcaaatgtcgaatgcaatcaggttaggaatcgcacggcgaaccataccgattacagcagggccaatgttggtgattgcaccgctggatttaccagaggcaatgttggttgcgtcgtaaccgtgatcacctgcaatttcagcttccgccaggaaaccgccgaaggattcaacgattttttcgtcgcgatatactggatcagtatcagcatccttttcctgagtttccagaattgctgcaaccagttgttttttggacttggtagcgatatccggtaaaccttcctgagattccagaagatcgttccatttttccatcaattcgtttttcttagacattgtttcttaccttataagattaggaaagggctttagccgcttgtacatatttattgatcttcgatttctctgctggaggtgtattttcattcaccggaacaaagtcatctttagtggttgtctgagtagtggtactctcttcaacctgtttttccgctttagtcgctaccatttcaacgattgcggtcagtttggattcgaacttgtcggaatattccaaaccttcgatcaggttctgaaccttttcaatttgcgattcagtcagatcttttgttttttccgaaacgatggtatcgcgtttcatgttggcgatctctttagcctgagcctgattagcttcgaacaggcgtttaacttcctgctgattctcggtcagttcatcttcgagttctgcaacaacatcaacctgcgcttctgggataactacgttgtgttcaacgaacagttctttcattcccattaccagagattcgaacagatcggccttgatatcacgggacacggcttctttgttttcagagagccattcctgcgcgatgtggtcgaagtatttattcgcatcttcgtacagtttattttcgatttcgccagctttttcggcaacctgggcttcaaccagttcatcggagagttccgcgatctgggcgatgtgggtttcagcgagtttcgcagcacctgcttttacagcttgttcgaatacagtggtgaagtttgctttcgcatcatcagaaagttcaactgattcgaaaatgctgtctaactcaactggggtatccaggttctgggcttctgccaacagttgttctttaagcatttctaagtttcctgtttgatatgatattatttatatagacttttcaaacgttcagagagttttctgaaagcgtcatcatcagcactattattctcaacaagcggtttgcttgactgagattcggtaatcggcttaacgtaagcatctggagcgcttggcccccaaacaacatcaacgcctactgccaatttaaacccttcttgtacgataccgtaaccttttccagaatcggaaagtttacccagtccgcgagaagaaacacctggaacccaacctgcgcgaattaacgccgcgagtttatccccatcaccgttatcaccttcgacaacaacagcgcgaccccaaacgtcattacctttccaccacaatttttcaattaggatgcaagcattacgcggatcgacattcggtcgcggcgggtgattcatttcacccagagcttgacgggtattaacctgagttctgatataatcgtttactgcttcttctaatacttttttcggatacagtcgcttattgcggttgactttttcggcttgtaggaaaataccttcaatccgaagtttaccgtcttttttcgactcaccgaccgattctaaaattgaatcggaaatatccgcacaaggtaaaccccattcctcgattagcagcatatcgccgttttcattgagttgggattcattcatatttatagccctaatgcggcgcgtttacggagcgcttttttacgcttacgctgtgcgcgggttgtaatagaagggtttgcacgttttgtttttagcgcacgacgcgcaatttggcgacgttgagatttagttaaaccagttgtttgatacgcattacgttcacgagttttgcggtcttttttacgttccacattaccgcgcgaatctacgtgtttaacaatgacttcatctaaactcaaaccctcgacaatggacatcatagccagggctaaatgaggttcattgtccgccaaattttcgatgatcttcacagtgccgtcatcgatccccagaacatcaacacgggctttcgcttcggttaaatggggttcgagatcttcgacgctgatttcttcgagttcgagttgcattatttacacctcttattcgtctttatcgtcgtcttttttatcagacggctttttgtctttgtcgtcgcctttatcatcgccgcctttgtcgtcgtcatcgtcatcgttgtcgtcatcgtcggtttcaccttcgatgcgtacagcttccgcgagttcaacgcgcatttcttggcgaagggcttcggtacggtcttccatgatggaatagaattgcttcttcgcttccaccagatcaccgcttttgattgcttcgataaattctttcatcaaaagttttcctcttcctcttcgggatttttgaaccgttcttctttggattcttctttgatcagcttcgcttgttcgtcaatgtcttcatcagacattcgaagaatctctttcatgatgtatttatgggatacatatttccctactacaccttcaacctgtgacattaacgttaggcgacgttccatgatctcaatatctttcacttctgcgtaatatgaatcttgctggaaaatgaaggagattttgctaacgttctcttcccattcttcctctgtgatgatttttttcgcgatcaggttagtttttaacggatcggaaagcacagggctgaactgaatttgcagtgtgcggataaacttactaaatttcagttcatcacgggtgatttcgccaccaccaccaatttgcatacccccatcatcgcgaggcatacggcttaatggcacacgcagtgattcatagagcttacggttaaaccatttgatatcatccatatcagagaagttagcaccgcctggaagcgtgtctacttcggtgatagctttaccgtcacgacgcatcaaccagtaatcttctgtcattgacaggttgttttgctggttcttaacagtacccgttttagcatcgtacacaacgcggtttttaagcccctgtgcaatgttatttacgtactgtgtcgctttggtgccacccatctgacctacgtcgatgtagaacacacggcgttcaggtgcgcgggtgatacggtagatgaccatcgcatcttccagtaaacgcaattggtttgctggcttgactgcgcggtgaagatatccgataatgttgttactacaatcttccagaccagaatgcgcatacacgatagcggagcgcgggattttaaccttctggttatgctgatagatttgcccgttgtatgtatagccagatttaggagcgctatacacgaaaaattcgcgataaccacggaatactttcacgccaccatcaagggtttcagtgatagattcgcggatcagttccatcgaacgcggatcaagttgacgcagttcgcggatacctttgctttcgtctttatgcatgattttatggaagtagatacgggaatccacataccaatcacggaacagacgcgcacccatgttatcaaaatcatagatatttagaacgttatcaaattcttctacgattttgtcctgaatcgccttactaaaatctgttttggcaagatccaaagtaatgatatctttgccctgttcattcacgatcgcatcgtcaataatttcagaaacagcgttttctacttctgggtaagacatgatgccgcgatatgtattgattaattgttctttgttctgaatcgccggatcttgtccagaataaaactgctggaatacgcttgcgtatttctgattagtcagatcagtttcgatttcataagcaccatcattatttttaggaggcgcgaccgaacctgtatcattttttaattgctgttcaagatctaattcgtcctcacgggcgaaattcttgaaaaagctaagtacattgccaaagcccaaaaagttcatagtaactccgaaaaataatgataggggtattgctacccctgtatttataacctttattcccaccagtccagcgcgaacgtaacctcaaaggttgacacttcgttgttgctgtcccagtccagggtaacttcgcctacgttagtagggaacagcccgtggatggtgtgatcggcggtaatttcatcgttacggtttttctgtttcaccgtagcggtttttttgtagttcgctggaatatcaccactaatctgatcgcccattccgtgcatcatgtttgaccatgctaccagagcgtcacgcgtattatgcgcgtcatcgttatagatcgtgattgtccagtcatcataggtacggtcaccagcaacgttgattttgcggttttggtatcctaccggaactttttcaactgtagccgctggcatggttgccgctttacacttgaatttaaagtttttgcccagatacgggatctctacttcgaacaggttcggacgtgcgaaatcaccggattcaaaggcgcgtaaaatgtcagtaagcatttttaacctcggattatttatgggggcttttcagcccccttgactttatacggcttgcggccctaccagttcatcgaaatctgcgcctgtagacgttgctacgaagttcagagtgatgtagttgatagaacgaggcggtttcacgtagaccgttgctacaaactcgttacggtcgattacgtccggcgtgttgttcgtggtgtcacagattacacggtaatcgtagcaaccacccagcgcacgaatattagtcatgtactgacctgtatccatacggaacgaagaacgggtgaaatcgtcgttgttttcaaacagtttgtatttcgcgttatcaccgatgtctttcttgatcatgttgaacaagcgacgaacgttgatacggtcaaatggactcggtacgttagtcagtgttttatcaccgaacagaacgaagccggaaccacccgcgaaaccagttaccgggttaatctgaacctgatacattgcgtcacgatgtgctgtgcgcggttcgatagccagtttgatacagttgcggatctgaccacggttgtaacctgctggagacatccacggttgagaaacgctatcagtgtaaacacacaggccagcgatatcacctgccagcggaacccaacggttcacgtcattgtatttatcatactgatatttatagttaccatccaggaagccatagcttgaacttacgttcagattgttatcaacagcagcaccaccactgagtttatagccagtacgccattcaatcatgttatcaaccgcagttgccagcgggatattcaccagaagtgagcgcggaggcgacacaaacacggtacaatcctgacgttcatcaccgattgaaataacatgtttctgaacggtagacataatctctacggtttcgccagcacacgcaccagcaatcaacagaggcacatgcagagcttcgcgatcagcgaacatatcccaaccattcatcagttcatcagcgcctacagtatcgtttgaggacaaaccaccgccgaactccaggataccggagaagcctttaggccagttcagggaagtaccgtaaacgtactgagagccaccgttcgcgaaaaagtcatccatgaagatgttgacaccatagatatctttatcggtcttctcggttgacacgatgaaggattcctgtacaataccaccacgacgcacaacaaaagcgtactggttatcggtctgtggcccgtaggtcattacagaacgaccgctgttcttaacggaaaccccagaagggtagccggaaatcatagcgccagaatcgtaagcagctttggagataatctccacctgaacagttgaacccagttcaccaggatacagagccacaacagacggcaactgatatttctgggtaagagtctggaaagcggttccctgaattgtttcttttgcaatatccaggttcaacagagtgatcccagaatcgctttcgatgccgtcaatcgtaatcgacgcagaaacaccggaagactgagaaacaatttcggtagtccagccagtagaaatatctgggtaagtaccaatctgtttagcacgggcaacgattttttcgcttggaatgattaccgagaggatcttgccgttactgtcaactttggacactttacctttttcttctacaacaacgctgttgtattttactttaatagtatcgttcacagtgtagttagaaccctgtgatgcgatagttgttttgatctggttaaaaattgcgcttgcgtttttagcggcatctttatcgacaacgcgaaccacacggagatcattaccgtactgcaagaagttaacagcactcatgaaatagtcagcggtcaagttgtctggggaaccaaaatagtttaccagttcgacttcgttagaaatctgacggatctgataagctggcccccatgaaaatttaccgacaatggcagcgcgaccagttgaatttcgaacaacggtagattgtaccgatgtttctttggtttcaatacctggagattgtaaagccattatagaatttcctctaatttatataaacgaaataccgtgagaaccaaccgaaatcgtttcatcaccgcttgtaacgataaccggacataatgcgtcttcgtatagctgttcgcgttcccgtgcaaaaacttcattggctagtcttaaatcgtctttctcgcagaattcggcaaatttcatttgagttgtaagccaaccgaaacaagcaagcgacataacgaggtcgtcgtgatatccttcttccgcagcccacgaaacgcctttttctgagaaagtacgaaattcgagtattgtctttttgttatttatgatcaatttatctttctcgaccaggtctttcagcgtcgaacatcccatagcttttgatcgcttagtctgtttcatacccagatcgttgtaactgtcacaaataacattctcatattccagttcggaaaacagagatttggcaactgaatgccctgtgctatttagctcaatgtaaatccatgcctcgttatacatattcagataacgtaacaggatgtccggcaaaataagatgcgacgttttgtttgagtgatacaccgcaacctgttcaaatggcatcgtcgtaatgtcgatgatgtgcattgcatggtaatcctgtccgcgcccttcggctggatcaagtaccgcaacgtatttatgcccctctactggacgtttatactgataaaagttcgtttcagtttcatcaatatctatccatgagagctttgacagtttccagccagcgatcagggttccactggtccccatgaattccgcgcagtgttcctgcaagaatgcctctttgctggagccagcgatcatcttcgcagaccacgaataaccgtcatcaaatacgccgttgtcgccgtctgtatacaatcgctctttaaccgatgtccagatcgcggtgtaaggcacgaagccggattttccttctatagcagcgttccagatatcatagaagtggttaagcccgttaggtgtcgttgtgataaggattttcgatttacgaccagaagagattactggttgaatcgctaaccacgcatcaacaaagttcgggataaacgcgcattcgtcgatgtagatcatcgcgaaggagttaccacgcaccgcatcgggagaagatgcaaacgcaccaattttacatttgttgtcaagttcaatagaacctttgttccattcaacgataccaggctgcaagaagtctggcagcagttcgatcgcttgtttggtacgatccagaacttccgcagacatcgaggctttgtgagccagcacaccaacatatttatcttcgttgaaacacacgaagtgagccaggaagattgcaacaacggttgttttacccaactgacgcgacaggttacaggcaaccatacggtttttgtgcatttcgatcagcatttcgcgctgatagtcacgcaactgaaccttgattgtaccatagtcaatgtgggtgatcgcacaatatgtttcagcaaaataaacgatatcatcacggcatttcacccactccatcaacatttgctgagtccatttagtctggatatacgcgcgtttcaggttagggttgccattatatcgggttttcttgttgcctttatttttgtacgtggcaaagttcgaactgtccttagactgaatatcgaccttttgaatgccgttaattttcaggtagtcactgaacgttgtcggataccattttttatcgtgttcgctttgtgtccactccatccccaattcatcaattttctttttcagatatttgggatgcattaatccgatagggtgatctgattccttactcggatcgatcgtcggttccatttccatcagggtttacctctacagcttcaccattaatgaagccctctttgggttcatatgcactgccgtatttctgcattagttccgtaggggaaccaacaaatacggttgcattctcgatattcaaaccatcaccaccgcctttttcagcgcctggttttgtagtctcttccgtaatctcacgcatttctttgtgaatcttcatcaggccaatgtttgaaacgtttaactgattcatcaggcttgtgaatacctcgacgtggcgaggtgattcggagttcttcgcgttgtgtaatgcaatctgcgccatatccatgatcatctgattcatatggtgcgcagtcttacgcgcgagcgtataatcctcttccagatccggtttccggtctgctggatgtgattgaacgtcaaccagttcaagtttctcgtaaacaaccacatcctccccagactcaacgccgccagggagggaatcaatattcagcaattgctgtaaatctaatttttcatccattttcattccctcggcttaggaggttcatcaccagacgggatcggcttatcgtgcgagtacgtctgaatatattcttcgcccgtgtagtcctgcataggcagatctaccggatcggcttgactatccacggattcaaagttatctttatctaacgggttcatgttagcgaagaaatccgtgtaaacggttctgatttcgcctttaacatcagttacaggcgggtacagataaccctgtaattcaaacataaatgaccactcaacatgacggcgttgatttgcatcgccctcgaatgtggtatccggcgcaaccgattggagactgattttgatgtctcggtcaactgtgatatcgttcttatgcagttcggtaatcttacagttgaaatgcggttgaaaatatggcaaaatctgttctgcgatttggaacatatcatcttcatatcgcgtatacacacccagttcgaaaatcagacgatatggcacagggttaaactgtgtgatcgtttttcgtggggttgctaactgtgtcattttttggttgaccgcgatactggttttacggattgcgttatattgcagatccaccagtgataagttcatgcgcggtaaaatcgtttccgttttagcaacgttttcctgactcaacgtgtagttaagtttgttcatggaagcgagaaacttctctttcgatgcataggtgatcggaaccttgatgtatttttcttgatcgccgcgtactcttttaacctgaacatggttaaacaattgtcccataagaacaatgtagttacgcagcgaactattataccagtatccaaaaattttctaatccccctgctggacgcgtccagacttacagttatcaaagtgccagcgcttcgctgtattagcggcgcacattatcccacaatgggggcattgtaccttttctcgttttttgcctttgtgagcagcaacgagacttgctatatgttctggtgatagcttctttcctttatgaacagcaccaattctttttctgaattcgtcggtatggtttttcccgtaaaatgggttgtttttaccgtcatgtttgcctttcatctgttcttttttaacaatgcgcattgcttttcgcgcctttgtcttttcttcaagaatgaactgctgttcttgttcagataacgatgaatagcgtttgtgttcataggtgaacatcatgaagaacgcaagaatcattttaggatcattggtttttgctaatgtcctgtgggccatcaaatgcttcattatatcaagttctactaaattttctggttcgtgttcgaattcaggaaataaagaacgtggtaatatatgatgtttttctgtgtgttcagtttttggagaagcctttatgatatcaacatactcaacgtatagatcatgaggcaaccattctttaagttttgtgtatatcataaaatcctctttgaagagggtatagacttccgcctatacccatataacgtatttatggcagacttgcaaacggtgaaccgcgtccgttgacaacatcaaaagattcgatgaattcatcaccttctctttcaaattctttgtcttcttcgtactgttcaatgttgatatcagccagaccgtcaagatttcgaatcggttcgagatccagttctgcatcaggttcgatatggattccttcatttcgctgcaattcaggagccagttcttcaccagtgtagatgaatttcgccaggttgattttacgctgaggacgatcaccgaactgatagaacggatcggcttctacccatgtaacttcaaaaaggctattatccatagggaaataaatcaaatcccccagaacaggaataccaccatcagtttgatgtgcgaacaaacgaggatttattaccagcgtcatttcatcgtttgagttcaaaccaaatttactaaagaaatctcgttgcccttcatagttggcatacgattcaatatacgcagcaattttccatgacttcgtaaatttagattctcggtcttctccaagaatcttatcaatattcacaaagtcgcgccggacgtaatacatatcaggcgatttcatctggattgattctgctgtcagtgaatcgtgtagctgttgtgtcgggttgtatttgtaccagtttacatacgggttagtgacctgatcctttaagttgcgatcaaccccttcccccgtagacaactgagcgaataaactttcatcccagttttgcattgttccccctacaccataatgatcggtactgcgtcagacatcgaaatcagttcatcgcgcagactttgcagtttggtttccgcttcctggatcagtcgcgtaccatcaggagcaacaccgccaggcaattgcattccctggaacttagccagaatttgtccgttgatctctttcaccagtgcggtagagtagtcttttacccaacggttgttatatgcagacgttccgcctgtaacagttgaaccctgtcccgctcgtacaccgcctacaaccgcgttatacgggttttcgtagatgtcggctatggattggtcttccactgcgttagaacccgctgtagcgtatcctgcgacgcttcctacggagctagggacatcaacgaaggaacgaaccatcgcttcaataacgataatgtcacctttgttcacctgcccccatgcgcagaactgaccagtatcatcgttgaaccagtaatcaggcagtggagccagcaggtcttgcattgagcgttgataggacatcatctgggtaaagtagcccatatccgcgccgtatgcgttcataccgtacacactcgatgcacagcgcccacccagagagccaccagtcaaccccatcaggaaatcggtaaaccacggataaaccgctgtaccgtccattgtggtcaatgaacccatgtttgtacgcaataccttcgtgatcgcgaagatgtgttctttgctcaagtcgaacacgttgcgcgggttatcatcacccagtgtcaaaatcagatacgttttgtttgtgccgttataatgatattctgcatacaggtctaaagcgcgttgaatgcagtcataaatctgatcttgtgtgatttcgattttgatgattggtgcgcccagacgacgaagaatttcatcctttaactgttctggattgttcgtaatcatatgatcctcaaaaggggcttgcgccccttgttaaaattatgctaccgtcacagtacattcagcagaggtaattttggttgagagtgcatcagtcacttcaactttatatactcccgcttctgctactgtagccaggcttgcgccagtttccccagtaacttcaaccgtatctttaaaccatttgtatgtatatggtgttttgccaccagtaacaacaacggctaaatccatattatcgcctgttgtgtaactcttcgttgccggaagatccgttgtaaacgccagagccggacgagtagttacagtcacagtcgcggttgctgaatcgttggtactgttcatcgcgtcagttacggttacatagtaatcacccgcatctgcgctggttgcagcagatttaacgatagaagaaccagtttcaccagtcaatacagaaccgtctttatgccatacgtaagtgtacgggggtttaccaccgctaaacactacttccagagtcaatgggtcaccatcaacaacagaaatatcgctcaagtttgtatcgaactgaggaaccgtatgtaccgcaatgtcaagttcatcagaagtaatcacggtattttcagcgtcggttacgacaactttatatacgccggaatcactcgttgtgatgttttggatcattacactcggtgaatcagtcccgatattttcggttcctttcttccactggtacacataaggcagtttaccacctgtaacggtaacagataaagaaatatcatcaccctcgatataatcgttacgaccgaccagattttgagtaaatgacaatggaactttcttcgcttcgtatttgttatccgcttcaacttctgtgatatacggaaccagagcatcagtaacatcctggtgagaggctttattctgttccagatcgtccagacgttgttcaacgttaccaccaccgccagcttcgagagcagcaacacgcgcagtcagatcggaaatcagtttataaatccctgtttctgatcctgtagtattaactccgatcgcagttttgttatcgcgagccgttttctgaataccatctttgaggaatggatcagaactggttgcgtcaccataaacagctttacccatcgcgatattagccgcaacgagtccagttgacgtattacccacaattgcggtaacatcaatcagtgcctggtggtcgtcgcgctgtgtgttttccacattcagcagacggcctttgatgcttgttggctgggagtcagtaccgatatcggtcataacctgtgccatttcaccgcgcagaccatcatcacttgtttcaccaacgatcatgttcagatcgctaatgctacgtttcattgtgctgatatcgtaacggatactacctggaacctgtgagttaccaacagcgctttccagaaggattacgcgaggcagaacaccaacaaccggatcattcatctgggtttgcagagtagtaatgttcgtttccgcagtttccatgcgggaatcaatactaccagaaccacctgagcctgtacgcccgatataagtgttgatgtttgacagttcggtattaataccagtgatatcgccaccgataccattcagacgaacatacacagattcgaaagtggctaaatgcttcggtcccatttcgttacgcagatcggtaacttcatctgttaaatgacctacatctgagtttacccagtcatcttccagcttagtaatacgtgcttcatggatagataccgcctgagcgttagccattaccttgtatttcacgccggagccagtagaggacggatcaacatcaccatcttcgttaaagccaggatatgcacccagttcatctttcaggaaaataatatcttttcgaatggtacgatgtttaggatcggttgacgcatcccatacaccaatttccttttcgatatcctgaattttcagggtgttgcttgctgtagttgcctgtacagcagacatatctactttcagcacgtcaacatcagcgacaactttatccagtttgtcgatcacactatcatcagagatcgccgcgaggttttcagtaatgaggttaacctgatcgataacttcgttgatttttgatgtctgggtagttgtatttgcttctaattgtaccgcgttcttttgaaccagaacaccgcatctgtttaaagaaccctcgttagtggttttggtttttgcaccatcgagagtttcgccgttaacaatccaattgatctgggtttgtgtggtgtccgtagggacaccatcaacaaacgggatctttggtaacgggttaagttttgaaatcatggattaacccctttatcgtactcgaattacgtagttgaccgcaaggtttttcattcgcgtttcgtttccgccagtacctaatgctttgctgtaatcgttattcaggtgcataacacgttggtcatttttttccgcgcctttcagttcataaactgcttgactcttaggaagattaccgccgttctggtaaatcatctggagatcatgttcgtgatacgcaaacatatcagcctgatatgtaccaaaaccgcgacctgcatccacaccacgcccaccatcaaagccgcgagctacaagaccgcgcatatcaggcaagttgaaaatatcaccagaaccgccgtatgtataaccaattcgggcaaacagttctgggtttgaattgcggttcattgctcgcccgttacagataaacaagttaccaacatcggcgttaaacgctgcaagcatcatacatccgatcgggatatttgcgtcaacatctgtctttgtctggtatttattgtcagcactaatcgaaccctgatacaatgcaccaccagtaattgcactgtttttgttgctcggtactacgttagcaccagcagacaaagcagtattcgctaatccggtattgatatctgttgttaatttaaccataccgaaagtagagccggaacccttcacagcagcgagtttttgcggggtgatcgctttggtgttatcagtacccgcgtttacttctgcctgggtagcgatacggagtaaacctaaatcactttcgcttgcagtcagacgaataaacgtgtatggtgaaatcgcaaacccatcgcgaatagtacctgcgcgaacttctgcaacagttgctaactgaacaagaccaaacgaactttctgttgcgtttgcctgtaccggaaccagagcagagatcgcttgcttcactttaagcggagtcattgcggtagtgtcatcagtaccggatgttgcctgagcagttgttgacagtttcacagaaccccaaacgttttcttttgcatgacgggtgttaaacacatagttcaacgagcgcggagtaagagaaaccagatcgtttgttactgttactgattctgcatcagttgcgtaacgagtgtaaccccatacggtttgtgatgcatgagggttttgcagacggtattccagcaaagcaggagttacgatcgtctgggtatcagtacccgcatcaatcattgcctgtgtcgcaatagcagcaataccgcgcacaccaggcgcggcattaggcaaaccaacatcagtacgcgcccacggcccaatagcggctaatgcctgttgtacgttcttaaacgtgctaggccattgcgtaccagcaggatcaaatgtcacgtaaacggatttatcgcttacgtggttaattgtattgttcatttgttatcctcatgcaatacgcttgaaataataaatcggaactgctggagtaacagcaaggtcaatttcacctaactttgtccatgtaccgtaaccagatttagcctgtacgtcgattgttcctaccatcgaaattccatattcagttttattagtaaccggatgcggaactgaatcaataaaacgaacttccagaatttccccgttgagacctttacgagtaaccaaatcgaaatatttttcatcgttgacgaattcaacgaatttgttatagactgtctcacatacggtagaggcgttcgttgtattgtcgaaaacgaacgggaaaccataaacgtgaatagtcgcctgtgtttgatctggatctgggtttgaaaccgtcccatcaaacgtaattgattctacctgttgcaccgcagaaggggggctatcttccgtcatcatgattaccccattgatcgggatctgttgagacaaagaatacaggtcatcaattgctgattgtacgttagggtaatctaccccttttcgaagctgatcgacgtttgcaccaccaatagtacgtttaccaccaatcagcggttctttcgtacccatttcatattgcaaaaagtctgcttcgcgggaagggactttcgccccctcccttgttttggaaataaactgagtcatttatgctacccttatccagcggtgaacagtaatataaggcgggagcgtttttagtttatctggagtagtgttcccccgatttacttttaatacatcctcgcggtatttagtgtaacctggccctgttgcatctgggtcaacctgacagccaccaataataatgatcccgttgtcatctttaatcaacaccttatcggttgactgaatttgtggaacgttgatcggtttaatttcataaccacgttcgccaccagtaccaccagaagtgtgagttggttgaccggaaccatccagatcgttattgttcagaccaaaatcgctatccgatgcatcggttgtccaacctgcaaggaacataccttccgcgtaacgtgtccagataccaaagcccatataatcgcctgggttagcatcattatgcgcgttttcgtagattgtcccgattgggtgaataacatcaaagaacgcttgcagatccagaagacgaccgctaaatgtatccgctactttacgcgaggttttctgcgttgggttgttataatcagtatattcgatctgattaaccagcgtcacttcttcttcgttgttcaggtaaatcttatcggtgtgttctttaataccgcctacaccgtcccattccattacagtaccgatatcattgttgaaccagcgaatagttaccacatcacgggattccagaggttgagcaaatttaatgccagtaaccacggagtcaacaaaaatcagactgtaatcctgtccagaaggaacccacgcgccggagttcgcaatacagctatcttcatcataaccttctgcgccctcacaaacaaatgtcgggagatccgcatcacctgctttaacaagctggcgaccgttcagcagcagttcgaacgagttcgggttaatcaaaattcgcggactgataccaaattcagcattagtgaacgtgcgtttgtttggtagatcaccaacccagatttcaccagggatactaacctgttctgtgtcgcccgtgttatatacgcgcatggtatgcgcttcatacgtcgctcgccatgcggcaataccatccagataggtaacgaattgaagcgtgtcaccagcgttacacgggtttttaagacggatatttacaccatccagatctaccagttgtccggcgctcgcaccaggtgaaccgtaatcgctgtttgatgaattaaacccgttcttgtcgtcgatgtacagcaagttaccgcgatagtaaacttccagtgcgcggacgttgtacgagttaccagggccgaacacgttcaggaagtcagtttgtccctgagtcgcgatatacgtttctttcgctacggttgccagatccgaagttgtgattttgtcaacctgtttgttttcaacatattcccaacgtccaggagaacaataaacaagttcaacgtccatcaggtctttgtacagttctttgtaagtcggtgagcctttgatggtatcaccgcttgcagggacgatacggacgttgtttaccgcccacttaccccatacgtcacgtaagcgaataaccttgttataatcgcttacactgcctttagggaggtttaccgtaatacggttgttgctggtattcagcgcccacgattcaccgaaaataggggtcagcgtaggcgctgtgtgcgttttccacgcacccgctgggtgcgggatactcccgtcacccagtttattatataactcggtaaagttggcgttagtcttttgaccaccacgacgcagataatcacctgcgccgtcatcaaccacgttaccgataagaatttcttgtttcatgctgcgatccctgatttaatggtgtcaaccgctttaatcgagaatttaatgcgatcctcggttttggattgtacgtttgcgtaaacaatatcactcgcaccaacagtgaacgtaagcgtgtacatttcatcttcgctatttttgagaactgcgtattcagttgaatacacgcccttagcgacacggtcaacagacaaaagaatttcagccattttattgactgtgcctgtcatattctccgcatacacgagaattttcgccccactgaattcactataaccaaataaaggaattgcggtcggtgatgctttcagaatgagtttagtagtatctacaggcattgtttttgaaccaaacattgattcaacagaataatcccatgtagtaacggaaccttctttcttcacacaccagattttaatctgagtatatggagaggtcacgtaaagctgatcctgaacccctttgataccatcgccaacttgcggacggaatacaacaggacgatcaacagaaatgctaccgttactatttatgaaatagaacccttcgccgggtttacccgatggaagcacgaccgtaatcgggcctgttgaggtatccatatcatgcaatgaacccagttcgatcgggttgcctgaataataggttcgtggtagtttctggaaatatccggtcgcgtggagcagcattgtacccacaccatcattcgcagtcaataaacgcacatcaccaaacgcgttgtacatgttggtgatgatttcgttaagtttaacaccgccgtcatacagcgggtcaccagttgacgggttgccgatctgccccacgtcaattaattttttaccagtttgatatgccattatggttttccttagaattcgaaaataatactgacttcttcggtctgatcaggagaacgaataatcggttgacggttttccatgtagatcatttgccctgagtcaagttcaagctgttctttcgtgtaatactgccccgttgcttttacttctggatcggtcggttgcgcctttttcagtaacgggtttacaattacactaacctgacggaatccacggttgccaggtaaagatgcttgcgggaagaacagggaatccatgtacgcacggaatcgcattgagtgaaccttcattcggaacaccaaatcatacatatctggataccacttgatcacgttgtcataaccccagcgaaccggatcttcttcgagttcattcgggaacggaacaacgatatgttcatttgtacagcggttgataacaacatctggtggaattgtatacagatattcccagatatagccgtcgcccatgtcgataccgttcgcttccccgcgtggaggttcgatcgattcgtgggtcggtgtccaaatgccaccaatgcgcacacattcaactttacccgtgatactggagattgaacaagagccaatatcaggaacgtctacaacgcggtataccatccatcctttaccgtagtcagtacggttataaggcgcggagtttacaaccacgatgtcattaatgtaaaagatttttgggtttggatatcgagtatcgccccagtctttacgcggaacgattgcatcaatcatttcgcctggtactttcgtcatcccgatcatatgcgtccacatatcaacgataccatctgtatcatcgttcggataagggggagcgaattcagggtcggattcgttatccgcccattgttcggtacgcccgattgacatataaatcgagttatgatcgggggtgtccccgatcatttcgcgaaagttcatcatgttttccgtgcggaacttaccagttacgaccgcacggtagatgttttgttgagccattatgctacctttctctgagtcggtggattcggatcgcgaggattacccgcatcgtctttcaatcgtttttccactaagttacggaactgagagtatttaaccgctgaactatcgaacagaggactttgatcaaatcgacgcgcggacggcagtacaccattcagcggtttttcatcaatgtcatattgtggcggaacatcaaacggttgtcccgctttcgggtgcgggtcgtacaatgcttcaccagttacaaggtcaaatgtctggtttccgttaccgtccagacgggctacgcgatcaggccaatacttcggataaccgctatcgaagcgataatttcgaagaatgtcaatgatcgtttcactatgcgtcatagacaaaccggagttgatgaacaccgttagcatggtgatcccgataaagccaaagcctaccggatgtacgaatcgtaaaacgtcatccttataacgggacgctggcagattcgaacgaattttcatcacgtagtaagaacgcccacggttgaagtagtcgatcgagttgttcgccatttgcttaccacgcacaccacgcagaatagtacccgtgaagttagtcttttcagacttgacaacctgcccttcaaggaagttaccgatcacgttgtgcagcgttactgaccaacgtaattgaccgtcatcatactggcgttcgatatacgtcacgtttgctctcgctgttggtgtgtaaatcgtccggcctacaatgtcctggttgatatttgttgaatgaaccagaatatcatattccagagtgttcgaactttcgatttctacacttacatcttcgttatacaacagtttgaacaggaatttatagcttgcttcgatgcctttcgttgagtagaaatcactacaacgagattcaaagaaacgaaccacctgatcacgcttcgttttatccaggtagatattacggcggtttacttccgaccacagatattctacgctgttcttctcacgcggatatttgttcctgatcaggttcagcagcttgttatagtaggtgttttcacccagcgaaacgaactgcaaatagtattccccgaacttctcgaaatactgctgatccagatagctttgaggcgcaaagcgcgtaatcatatggcttaaatctgggtcaatcaaaccaggtgacagatccggttgatacggtttttcgcgttcctgctgaatcagatcggcaatcaataacgtattgtctggtttccagaaaatcgttaagttgtcgcgagcgcggtaactcagttcaaagaacccgatgatttctcctgaactcttatacagcaacacaccgttcgtatacttcgtgaatccggtaaacttaatgttgttaatgtaaatcgtaacatgtccgcgatcccatacctctttgttcacacgaagcgatgacgaagggccagcactatcggttacaaggctgtaggtgattttcggatacaccaccagaggacggttatcattagtgatccatgtgcgcacagagtcgcggaagaaccagctataattcgcctcgttgtaatattcctgcgcaccaaatttccaaacagtcgggtcgtcgatatgagcgcgaatcgtcgcaaagttaatcgcaaggctggcagtatagccaggacgcaaatcatattttacagcaccaaccagtgcagggttctcgatcaataattcaggatcgggaagtgtgcctggatatttgtagttcgctacggaaataaaaatctccgtgccgttcgttgacatattggtgtattcatgctggatataaaaacgttcttcctcggtgttcccatacaggcgcacaaaggttttcgtgttttcttgccattgatacacaccagcagcagcggacggaaccacgttagcgggttttgtaggatcttgcagagcggttttcacttcacccgttacgagtgcatagagaataccatccatcacatccattttcttgacaacgatcttatcatttccagggacaactgtatagctgtcagtatcgaaaatcttttctccgaacgttggagaactcggatcggtgtcgatcggtgtctgtttcagtgcgatacgacgcacaacgtttttagcaaccacatagagccagtcatcggaacatgccattgcttctgcatatttcgatacgttaccaggcagtttagcaaatgtgttgtatgagtccacatcgaaatcaaggccagtctggttccccagtttggcaaacgtaacatcatcagcagagaatcgcacatcgtccgcagaccagcgaatatccgttgaggtgcgcccgtagaagatacgatcgtaacccagtacataggttgtgtttcggctttggtacgcaacagagcgcgatacagggtttcctacgcggtcgttaaacgccttgtagtaatgccatgtttgtcctttgtcgtttgacaccttcgccatgttctgaaaacgttcaaacaggtacaataaaccgtttgacgctaccaggaaagttctgttaatgtcattacaaacgtgttcaatatgatcctggatttcgtgatagttttcttgtgtaagaattttatcgctgatctgggatacgtcagtgtaaagtggagaaaacacaaagtcttctttcatcaacgctgccattaccacatctgtattaaagttaacgtagttctgattattttttgcgaatttctcgtttatgaatgcatcgcttggcgtaaattcacgcatggttgaatatgcgtaagcgttaagggtaaacgtccagagttcatctgtataaacccagtcagacggttcaaagcccttgtgcgtaaccatgacgcggaacttgtaaaaattgttgggctgaacatcggaagaaaaccattcgtttacataagcataacccaactggaaccaggttaaatcttcatctggaatagttacaccacctaccccgcgagtttctgccatttccacgacatagtaaaaatccatgccgacgctatcccacttcaaataaacgaagttagcagccagtttatcaacgcgcaaactggtaattgacggcgctttaatcatatgtttctccaaatttgcgttttacttatatcccatatttagcaaacaaaaaacccctgccaaatgacaggggttgtaaattattgactgattggattcatcgtcaacgttgtatattgaggacgtagatcgttttcaaatacaatcagagaaccatcacgggtgaaaatgttctcttccagaggtgtaccagtcagttcgatgtaagcagcgctgaatcgctcggatggaacgttcaggacaccaagatcgaaactaatgaaatcattaaaatgttccacatagccgacttcgtaatatttatcacgatcggttactccaggatatttatcaaaatcgttttctgtataggctgcgataccgatatcaccgtttttgaatggcccgataaccattttcgcgagtccggtcgtggtgttcatatctgttgacgcatagcgcacatcatacgaatcaccagcagcatttgtgtacttgaacccattcgaaacaacagaacgtgatttcacctggtttaagaagtgaataccagacatcggggcgctgtaatagttatccagttcacgcaatagctgaatagtcgcagaagaaccaatgatcgacacgtccgcgttatcaacataagtcaacatcttggatttactgaaagatttgttgaaaatttcaacgttatctgtgtagtatctgtcaatttcattgattacttgaccacgcaaccattcctcagactcgatcaacttactgatatcatacgttactttaacgctttgtacaatatacaggtagttcgggtcaaggatcgacggcgtaatagtcgccaggttatacttcgccagatagttttgcatgtcctctttttgaacagaggttaagcgcaaccctgatttcggtttaacagcgatgaacgcatagccaggtttttctttatcagtaaagcactgaaccgcctgaataacagaaccgaaacggtgagacaggaacgattcataatccgatgcagtaacacaacggcgctgtgtctcacgcataataggcgcgagttcacgaatacgttcgatatcttccggttcaccaccaccatcagcgcctacatagtccgctgaatcagtcgggttttcaacaatacttgtaatgctgatatttgtcaatgtatccacataaacaaagttttccgcaccattggcttcttcgccattggttgaaatatattcaattacaatagtcgaaccgtttgcaggtttcaagcccccgatgtaatccgcagtcagagcaccacctgcgacctgttggctggtttcaccttcaccaaagtaaacttcggtatgtccatccacagtttcacgcatgtaaaaaattgttgatgcgcctgttgcgtttacgatactttcgtttgtccagtcatcccattgagcaccgttgacagtaacgcgaacctggctacggtcgatgttcggatctcgaaccagaatcgtagaaccatcatagatgacttctgtacggactaaacgcccctgtacgatgttcagcatcgaaacatagttattgtctttgtcacgaacgatcaccacgtcatcagatacgacgaacgggaaactgtttgtttctttcactgtaccgatgaatttcgtgccgcgcggaatacggatcgatgttgggttcagtgggtttttcgcagtgatcaggatcgaagtatttgcagcggtgcgggagtccggcatatagcccaaatcctgagcctgttgaacaacagaactacgcaatgcagcggtacgaataaacgattcgaacagtgcggtgttactcatttgctgaatgtacagtgtacagtatgataacagatccacaagtacgttcatgcgcgagccggagaaatcataatccttgaattcgtcctgacctcggagccagttgattaagtcagatttgatttcgtcaaaagtagccccgacaaagatatcggggatctgattaatttgtttctttgtagtagccattattacccctcgttatcgggtatttagtattgaaccatagggacgcaaacactaattgaaccgaatgtgatcgcgagtccgattaatgacaataatttgtttacgtattgagttaccttacttagagcaagcgtacaaatctggttataaatcaccttgcatgtgtccttaaacgagcgggaactgtcaacaaagtttttatatagcgattgtgcgcccgtcagcgcgttctcatacgtttttaacaggtcatcgaatgcaaccccacagtaacctaagaactggttaatctgagccattacaggcagttttttgagttcagccattgccatgctgtaggtgtctttcatcccatcttgcagagtagcaatctgtgctttgattccctcatatgcggccttagtcgcattcacagcagcgttagcggcatcaagtgcagcctgataagcagcggttgttgcttccgttacaggttcccacatccagtttaggtactgatcgaacttgcgtttaatcgaatccctttcctgtgtctgtgctttcagggtgttgaatagttcttgtccctgatcatacagtgcggagatctgcgcataggatgcatcaatgaacgctttcactttcgcttgtgcttgctgatacagatccattgctgtaaaccctgggaagttaccgcccagaatcacatcaagaggtttaatctgtttcatgatgttacggatagccagcaccgcagaccaaagcgggtttggtgtttctggaggcattgaccagatctgcatcatacgcccgtacaaatccaccagagcaacgcaaccgttttggaacatcgtcaaacaccagtcaaataacgcgctacaagcgtctacaaggtcgcgagcgccagccttgacatattcaacggtgtagttgtaagaactgtctatagccccgtagattgcgtttatgacgctttcatacgtctgtgcgccggagtcaatcagagcctggaaagaatctttcagggattgaaccgaactatcaccaaacaccagatcgtaaatgttgattgcaacacccaggatcgcaacagtcgggaggaagttattaatcagactccatgccccgcccacgatattaaacgcagagctaatgatctgccggaataccttcattgcggtttgccatgcttgctgtgacaatgccagagcacccgctgtgatttcttccatcccaatcgaaagcccgtcaaacatcgtcgcaatgcccttaccgttcttaatcgtacccgtcagcatatcaaaagccagcttgaacgttttacgagtctcgttccacgcagacagcatagcatcactgatatttgtatacgggaaccctacggtcgccggaatacagcccaatccagaacgagcagaaaataatctggcttcactcggtagcgccccatacgttgacgggagagcaggaggaaccggaggaatgctggtatctgcgttcgtgtttactgacatccctgtatatttgcactggtgcgcgggggattcgtcgtgtttcatgtacgcaatacgattaccattccagtaataatcaatgctggtaaacgcgcctgtagtctgattgtatacctgtcggattcgctgatcgcaacgggggccagaagtcagcaaataaccaccggagttttccaccttgtacatcgcgagttcgccagggttcttgaacagattcgcttttgacagatccgccccataccagtcattacccgcgagcttagtagccccgatagattcgatataggcatcaatatccgcttgagtggcgaaataataaccaatcttcgtaaccaaaatgtcagtagaaactccagggcttccatctggatttgtgggtacgtttggagagttcaccaccggaagcggatcgcttttctgcccgaaaggggaactcgtatacaggtgagttccgatcgggatgatttcggtcgcccattctaccccaacagcggggtaattttctgtgtgtccctgccagataacgcgtcggtaatatccagcagggatctcagcatcgcaaggatgctgaaaattttgcataatcccatcaatgatggtttcataatccatgatcatgattaacctacctggactgttccgccagtgatcttagtcagtgcgccggaatcaatgaaagtattattcgatgctcgcatgttgatattacgtgcgccaatatccaaatcttgctcaatatcaatcagagcattttttgcggtaattgttgcatcctcagttacggcaacggttgcattctgtttaacgttagccattaaattctgattcacgtttacggttgcatctttttcaacggttaattctgcgttgcctttaatcagccccacatattcaccttcaacggtttgattcacgttaccgcgcacgaactcggtcacgttaccatcaacggtctgttgaacgttacccatattgtaaatgaacgcatcaccctcgataacaacctgcaaattacccttaacgtttaatttacggccttgcatgacgatttgataatcatcaccaacgattttaacaacacgggttccatcagggcgaatttcttcgtatgatcctgctgggtgaacacggttgtaacgttcaaagcctggtgtatcgtcgaattcctgaatgtgtccagaacgggtttcgaataccatgttgtatggatattcagcattgtatgcggatttaggttcctcgaacattacgcgagtatcaccaggaacaaaaggatcttctggatttgatgcagccaacacaacagcattgtatgcagcactcaatgaacgcccttctggatctggaacctgaacaccgtatgattcgaggttgcccgtcagcacgattttagatacgcgtgaagaacgtcctggtgtctggttagcccatgttgagtttcgcagttcgttgtaagcggtttgccagtcctgacgcttcatagcagccagagcattagtaaatttggcaacaccaccaacacccatctggaagcacatgttttcgattgccatttgacgaggacggtttaacgtcacgtatacttctcgaacgtttgaagtgttgctgatcccctgccggacttttgccaaatcctgagcaaacagcgttgaaacttcttctgctgtgatcgttccattggttacttctcgaccaactgctttactgatcgcggcattgatcttcgcagtatcacgggttttctccatgataagcaaatgcccgatcccgatagtcggataaccttcactatcaatataccattttgtgcggataccttcatcctgtttaagcatggtttcgatagtgaacccgccagtatcaggacggttatcttctgggatctcgtcaagtgggcgatcatctggattgacagctaacgaactgttagcatcacgaataatcacgctcgaagaaccgcgcccctctgcgccaccacgagccagtacgttgacatcgttacctacataacgaggatactcaccaaacgggtcacagaagcctttctgggtgtccggtttctctcggtactcacccgcaaaggttcccagtataacgccgtcctggtgccatttatcgcgccagtaaccgataacaaaactaccgcgcgtgataccagtcggggaaaaaccaacaccagaaatagcggcgctgcgaatatcctgaataggcatcatccacggcaattcctcaaccggaataccgatagtttcagatttttgtttctgtgccggatgctcaccgaatacacgcacctgaacacgccccaatagacgaggatcatcgacttcttcgaccaccccctcaaagaaaggggagtatttatttccaccgtatttcataggtttgccttttccatttccttgatataatcacttacaaacgattgaatatcagaggggttaataatcttgatggttcgttttgcttcattttgaagcaccgcatcttcataaatatctacagggactaatgttccctggtactgcaaataacgcatgttcttatcgcctttgtcataccaatgaccggaattcgtagggtcttcaaccaaattgtaataacggttgcccttaccatccatatgataaagaacctgttcaccacctgcttttgaataacgctggatagcgcattgataagccgtttcctgatcggtaatccatccgtaaaacggatcgtaattatcgttaagcatcaggataacccagtagtattgctggtttccgtatagcgtttccgctaattgttcgggtcttaatgaacctgtcagttgatatgtacgcggcttataattcctgatcacgcggttaaagtaaaaacgataatcgcggtagatatcagtagttggtgtgcctttgtaatcaactggtggaaagaatgagaacaacattgtaatttcccctatctaatgtttactatatttaggatctaaaatggctggaagacagacatacaaggggtcttttatgccccagaacatacagaaatataagggagatccgcgaaagataacgtatcgttcaagctgggaaaaatatattatgaactggcttgatagaaacccgcatgtgaaacgctggaacagtgaagaggttgtgatcccttatttcagcaacgcagacggaaagcgacggcgctacttcatggatttctatgttgaaatggataacggtgtgacctacctttgggaagtcaaaccgatgaaagaaacgttgcccccacctaagccagcgaacaacaacgttcacaacaaaaagaaatttgttgatgcgttgtatacttatgctgtaaacattgacaaatggaaagccgcgaatgcagcagcaaaacaaaagggctgggagttcaagatcatcacagaggacacgttgaaacgtgtgttcggatggaaagggcaataaataccctaaacggagggaattatgagctttatttttgagttcgagatcatcgcagaagaagacaagccaaaaccgccaccgaagcgaaagctgggtgaatgggttgaacttggtatcaaattccgacgcgcaaaattaaaaggcatgacagccaaaaagttcgcggacgaaaacgggattgcatacgcaacgttcacaaagtctatgcaccgctacaagcagcagattgatgatgaaatcgaacgccgtacagcagaaaccgaagcccgacgcaaacgtaacgactatcgcaaaaaacacgcggttgatatcgtaaacgatttccgaaacagtttgaagaaaatgactgttggtgtaaccgctgcgaaacgtcagaaggattcgaccgattggtttggtgatttcatcaaaaccagcattaagacgcacagggttgcgaaaccagcaacgggtcgcttgtatacgttcatctacgatgcgaaatacaaagacaccctgccatactgggatcggttcccgctgatcattttcctgggttcaggacgttcgaaagcgggtaacttggttctttacgggctgaacttgcactatgcgccaccgcgagcacgtcaagagtttttagaagaactcctgaaacgtggctacggatcaacagatcgactttctaacaaaaccagactgaaaatcaactggaacaacgtgaagggaatgcgcggggctgatcaaatgatcaaagcctatctgccagcccatctacgttcaccacttgcagagatcgccccaaaagattgggcgaaagcagtttggttgcctacacaggctttccagtccaaaggaaaaccatacagcgcgaagaaagtttggaacagatattaacaaaaaagccccaaccgaaaggaaggggctttatttttacaggatactcacgatttccgcgagtttgccaggggttgcgccaggtcgaaccttcatcgcatctttcaggtttttatcaaccatcttttctgcttctttttcgttaaacccacgtttcaccaacacagcaataactttttcgcgaatacctttagcggcttcgttcaaatcttctgattcagctagaaccagtttagacagaacatcacctttgtattcctgggtaaagcgtttacccgataccagacgaggcttaccagaggcatctacaaccgtaaacacggcgtattcgcctgtagctttggttttggtacgtccggtatacagcaagcacatatcgttacttgggagcttgtacacctttcctttcaccaatgcttcatccagaggcagatcaatctcgaaatcttccgccaactgattgtacagatccaggttttcttcggcttctttgtacagggaagcgcctttgaatttcagtggcttgtcaaatttcaggtcatcagcaggatcaccgctgtagaatgaaacagtgcctttcgcccagtcaatatacgctgcctgagtcttgccagtggttttacctttcaggcggacaacacctttaccgaagtaagcgagatcgtgggagtctggcgcatacacatcgtaatcagcaccatgtgcaaaatgcaggaaaccgatctgaccttttgcagcgttaccacggtcaaccagatcaacggtcttagcaaattttttgttctgaacagattcagaaagtagttctttgaatgatttcatgttttcaatctcttttgaaagtataggtatagtatacctatttattgaatagatcaactaaaaattagatcgcgagcgaagcgagttccgtcaagcgaagcgaagacggatagttaacgattgtataaaaagtatacggaaatgtactgttttctctatatataaaatataaatattataaacagtacatcgtacataacactcacttcgttcgtgtgttcgcttcgctcacggtcttgatctaaatatctataaaatggagatcatcatgaatacaactgctatgatcctgaaccagatttcacctactaacttcatgttagatattcctgacaatgattatgtaaaagggttgaaactacaagttcagggtgttacactacctgctatcaacattccaattacggatgtcccactgaacccaatgattcgagggaagatcccaggatctgcaatggagttcgatccactgactattcgttttgctgttgatgaagaactgcgatcgtatcttggggtttacctttggatgctcggtactgtcgattttaacaccttcgattccgtgcgttggagtgaaccacaacaggcaatggctttgcatatcctggataactcgcagtcaaaaactgtagcgacatttcgcttctatggcgcttggccctccaacctcggagagcttgagcttatgtataccaatgattcggatgaagccgtatcctgtatgacgatgttcaacttcgctcacatggaaattgagatcgacggacgggtgatcgtgcctactccacggaaaacgcaaaaatgatttatggtatttgtggtaaaaagcgaacgggtaaagataccgttgctcaaatggttgtgcataacttccgcaatgttgaagttatcgcgttagccgacgaaatcaaagctatcctgaaacgttctatggaacatcacgataacacgcaattgcgagcgctggcagcgaagaacccattctatgagggtgatcgtgaagccccgctggtgatgtccaataacgatgcatacacgctgttttctagcggtatcaaaaaattaagttctcgcgggttcttcatgagtaacgcagatgttatcgctcataaaatttgcgaagaaaacacccagccctggacgattcgccgtttgatgcaggtgttcgggactgatattgtttgtaaagtagatccgtctatctggacttcaattgcgcttcaaaaaatgttgaaatcctacgcggatcactttatcattaccgatgtgcgtcaaccgcacgaatataaatacctgagcaagttcgggactcgctttgtgttccttgaacgtgaaactggtattgaagataatcattcaacggagaaaggtttgacacctggcttgagtgattatacaatcctaaataatggtacgttagacgatttgaaacgcaacgtgcttaatgtattcaatcttttaagagtgtaaacaatgactgaacaaaaccaaacccaacagcttcaaaacgatgtcctgatcctgaaagcccgtgtattcgacctgaacgaaatcattcagggtaaagaacaagaactggcaaatcaccgtcaactcgtaggccagatttgcggtcttctggaaatcgacggttcgcagggtgtatcccctgatgccctgatcggcgcgatcaaagcacttctgccagcaacagtagaaatcgctggtgataatgaagcgattgatgcatcaaaagcataattaacgcttaggcgtttaaccactgggggcgaaagcccctttttcatttggagtacacatgaaaagttttattgaagtagcgaaacccgtagttgatccggggatctatatgtgtgcgaagttcgatcaggcttcctgtgaagcgctcgcgaaggtgcaaaaacttctgggtgtagagaatcctgtttccgctgcaaaactgcatacaacgattgtgtatagccgtaagacggttgatctgttccctgcctccggtatctctgaacctgcccgactggttgacgtggagaagtgggaaacgaagtatggcaatacaatcgtcggtgttctggaatctgactatctccatagtcgttttaaagatgcaatggatgctggagcaacttacgattatgacgattacaaaccacacgtaacgctcgcgtatgattcacatatcgaagatatcagcggagttaaaagactgttgacactgcccgtagatttgactattatcgaggaagatgctgaaccgttggatcttgataagaaagtcgaagacatcacggagcacatcgaacatcgcggcgataagtgggttgtactaaaccatgaccgcacgaaagaacttggtgaatatgattcgaaagaggctgcggaaaaacgcctacgccagatcgaatactttaaacataatgggtgatttatgaacagaacacgactgatgtctcgtatcaatgatgtacggaaagaaataaacgacttgtttaatattgttcttggtgatttctataccgtcaaggtatctgcaacaagagaccatattgcggatcgtttcattgaccgttctgcgtctatcaagaaagatttcgaactgtatcgagatatcttgattagtcttgcgaaacattattcgtgtaacgttctataccatgcagttaaaacgaaaggtggcggcgcacaagagcttattgcttaccgtcgcgttaatggtaaggtttttgcgtgtgtttgtaccgtccagttgtttgatggtgaagaaaagccagtgattgcgttacgcttacgcacggtgatccctgagtacgaagcaaacattaccacgcgcaacgcaattaacgtgaactacgtaccgcctaaaatcaagtttgaatatgacggataccgtcgcgttatgtctcgcctggatcgtctgattgcttctccagattgtccacctcaactacgcatgttgaaaaatatttgaaaaagcccttgcattcgtgcaagggcttttgttatattaggggtgtcgaaacaaaggaggcaatcatgaaactttactggctggtgttctcaaacgggtttgtgatgaaaggtagtgttcactgtgcgaaagcatattgtgaatggaacaaatgttctttccgcgtattgagcgttgcttcttctcaacctatgggtgactactgatgactggcgatcgtatcgttgataaaactttgttgttgactatggtctatattctggtaaaatacctggtatagagaaaagggaggggattatgagaaacttactgaacattgcagaactcttttgctacggtgtcgcggtttacgtcctgtttcatggtgacggtgcgggatactggatcatgtttggcggtggcttgttcctctctttcatcaagaaattctataagtgagaaatatattatgcgttcaaatataccttcaaacgtgtttactgtaatcaagccaaacgaattgaccattgctgacgttggagcgctggttacacaatttggtcgttctaccacactgggtcaattgtatagtgctgtcagatcgaaatacccgtataaatgccctaagtgtgatggaaaaggatacagtgttaaaaccttcaacacttacccttctgggttgcctgattatggatgggttgaccagatggaagatttcaaaatcgtttgtgatgtttgcgacggacaaggttacaccaaagatcaacttatcgccaaacctgttaaagtggaatatgtcaaagcatgaaaatcatcgatcttgtaaaagcggctaactcaatgttattgagtgaacattacgccgaatattgcgagcaataccctgttcccctggaacgtgcaattgctcaatccggttatgacggtatcagcgaaataaccgttgaaaacctgaaaaccttcatcgtgtttgctaacacgttctggatgtatctaccggataacccagggattcgccagcctactttcttcacgctgtgcatgttctgcgaaacgtatctcccagactgcgaggattacgaagaatattatggctaaagtatccttgttgcagttcgatcctaagctgggtttcgctttctacgcgcacggttttgccgacagcgccgaaatgatgttcaaaatggcgttcgggattgaccctgcaacgcttgatcagcaagtgctggcagacatcaacgaaacccgtacactgtattattaccgtttcgctgacggaacaaatatgatacaataccaatcgaccctcgataaactcaaaactgaactgaaagaaataggtgaattatgactttccaatctgaacatgacctgcaacttgctcaaatgatcaaagagcaaaacgtataccgcgatattaaactgtttgaagcgaacgaagatacacgtcgcgtgttctgggtcgaaatgtatcgtcgcgctatcaatgatagtcgtggacataccgaagcgaaaaaacgtgcagataatgcgcttgccgcatatgacgaacagtttacctctaaaggggtataatatggaattgtctgctggtattctctttctgaataacggcagcattctaatgggtcacgctaccgaaacgccccactgggatatcccaaaggggcatgttgaaaaaggcgaagcccatattgatgctgctattcgtgaatgcttcgaagaaactggttttgaagtgttcccagaccaactgatcagcctgggtgttttggactatacaagcaagaaaaaacttgcattgtttgtctataaaggcgatacttaccccgaagccgaaaaatgtttctgtgcgtcaaccttcgttaagaatggtcgaaccattacagaaatggacggtttcaaatatgttccttatagcgaaatccgcgatcatgcgcgtaaaactatgggacaccttctgactaaaattgtgggatatacatcatgagcaaaccaactacttttcaaatctgtcaaatgattctcgttgctaccgcaacccgtgccgctgaacctatcgcatacagttcgtgggattctgaattcgcaatcaagcatattcgcgaccttcctaatcgcctgatcgggtcacctgatttttctcccgtcgatcctaacgagttgacactggaagaaatgaaaaatttgggttttcgtaagtggagcagtgaatctgatttgatgctgatcccgttatatctgttgccgtatctgaaagagggtatcaccgtaaccgatatttccgacaatcaatactacttcttccgtgacggtgcagataacgatcatcgtatgggtcttctggcattcggtgttgtcccaaaggcataacatgaaaatcgttgatttcaatactctgtccgatatggggctgatctggaaaatcaacaaagaaatattgcacccgctggggctggcgttaacccgcgatccttctggtatatcagtaggtgcaattgtttctgatgatggtgcttgggaatacccagaaacctctgattttcaaaacatcgcaaaacttaataaagtttatgctatgcaagccgaaggaaagctgttagaattcctgcaacaacatacgaaataggggctaacgcccctctgaggattatattatgaatggtaaacgtgtagtcgtaatcggcaaatcaaaacataacgatgtcggtactcacctgatcattaacaacgaccgtggtgattggtacggcgcaacaaatgtaatcagtggttatgcgactatcgtagaaaaagatgctgtgcgtatagcaacccctgctgatcctggttattacggaacacgtgacgagttcgaaagtgaaaaggatcaagagatcgcagaaatgaaaacacaggttcataatgcgcgtgtttttgctgctatgtgtttcactgttgcggttgctgtaactggtttgttctggatggtggtttatcatggctgatgaaatcgtagcccgtaaccggattcgtgaacagataactttcagaagtcgcgaacatgcgatcatggttggaagttatatccactggtggaaaaacaatgatctggatctgaatccatcctatcagcgcccctatgtgtggacgcagaaagaacaagatgaattcctgactacgttgatcactggtttcccgtgtggtattatcgcgattgctgttgatagtgaattcaacgaatctcattgggtagaagtaatcgacgggaaacaacgcctgacgactatcatcaaagtctacgagggtgagattgggattcctatgccggatggttcccgtctgttctgggacgatatgcaacgacatgaacaacgagcctttgaaaacctgtcattacctgccctggggctggatgaatgtaataaaaaggatcgtcttgaattcttcatcaaactgaacttcgctggtgtgcctcaatcacaagagcacatgaaacgagtcattgaaatgtataaggcaacaaaatgaaaccaattagtttagcaggatctgcaaccccgtttgttactggtaaatggtactacagaaagcgcctgagtcgcttacatgaatacaccctaaaggctaaagggatttactatcctcaagtcatgcaggtacactgtgatgctgctggtaacgtgcgttctgttctcagtccttcggaaaatggtgaattgcgagttcttaatcgcgatattcctaaagaatactatattctttacgaagagttcacaccagtaactacagaaaatctgcgtttcgaacttggtaaacgctaccggattgctaaccgtggggctattgattccctgtgtaatctggatctgggtcgctatggacataacacctcgttacgtcgcttcctttctcatggtagccgccgtatgcgtgaccgtaacgtcatttatatccacaccgctactaaagacggttgtgcgttgaaaatactgggtagtgaccatgcaagccctattcagcgttcttttgattcgttgatccctggttggttgttgatgttcctggaagaagtaggaaccgacagagaaccaattgaaagagatccggtcgaaactatggtttcacagattgaaagtctcgaagacaacacgcgccgccaggtgaatcaggatgattatatcgaccttgattttgcgagtgttcatgatgaaaacgaatttcctgatgataatggtgttctagtcagtaaggaagattccgaacttctcgaagcggtgaagtttttaatcgaacatgcaaatgttgattacggttctcgtgcgatcattcgtctatccgctgatggatacacttatggtgttgatgatgcaaaaacattggtttcatgggctgcaaaacgcagacaggaattgatgcgatatagcgatgaactgttttctaaaatcaacgacttacaagcattaatcaaaaaattaccaaaataattcaaaaagcctcttgcaatgcagggggcttttttgtatattacacacatcgaaacgaaacacagaaaggggattcaaaaatgggtatttcaagcgcggttgcttctaaacgtctgtctaaagttgttggttgtgaagtcctggaatattccagctatctcactgggttctctttcggtgtgaaaactgaactggaagcgtacaaagccgcttacgtttatcgtaacatgccacgggttgacgtgtactacacggaatctatgggttactggatggttgctgtttacaaagaagcaaactgatgaactttcacgaacgcaaggcagcacgaaccgattattacatacggttcgtgtatggctggaaattacggaaatgtgttgcatgtaatgggtctgggcgatatgataaccacggatcgccaaaatgtagttcatgcaacggtactggaaaagaacgttataaacctgtgagggatatattatgcaacatgtgaatctgaatccgaaaatgaagaaatatctggatcgtcgtcatgataaccagaccagtaaggatcaggaactggcgttcaatattgaaaccgcaaaactccttactaaaatgtttcgcagattcccaaacaaggtaacgcataccagtacccatatgcgcgtagaactggctgataaacgttgtatcatggttaagctggcttacgggttatcggaagatggttacaacctggtgatgggttggacatcaatgatcggtaactacgttgaacagaacgatatcgagtttaacatgatgcgtggggatctgttccagtgtccggtagacacgatccatatcggtagcctttacgctatccttcgctcacaatatgaattatgggatatgaaatgattttagatgaagaattcgaaatgctgaatcgtgctattcagcaagtaaaacctgttatcggtgacaagtgggatggtacgaatcaaccaggttcgattacgggtaacgttaactacggttgcggtagcaacatgaagaaacgcgcgtttaccattattgggcctaaagcgttacaggcggtacaagaggatctgtggttgcaatccctgatacaatacatggtttcgtttgatcctgataccactgaacgcctccttaaagagattgtacttctacacaaggagaacgataaacttgctggagaacgcgatcactggaaagcaaatcatgaatgcgaagtgtcacgcgcccgtgtactcaaacagcgccctgatatgcctttggagcgcatcaaagcatatgaccgtatggttgagttggaaaaggaaaacgaagccttaaaacagcgtatagccagcctggagaacgtcgaaatgactcgtgtcatgatcgatatggcttcacagcgtggacatgagcaaacccagatgttgcatgaaattctgcgatatatgaaagcacacttcaaagatccggggtattactaatgtccttgttcaatagagagtgtaatcacgttgcgcggggctggaatggtggaacaccttacgcctttatgaagtattatgttatggatgggatcgaccgcatacatggtgatatgtatgcaacatgccacaaatgcgggaaagaattcttgatgtgtaaaacgcatcttgatcatgcgatccgtaagctggcagaacatccaatttctcgtgctgaaatccttcgaatcctcgaagaaacaaaatagcactttttgttaaagaaaccccttgcctatggtgaggggttttgttatattacacacatcgaaacgaaacagacaaaaaggaaatcatcatgaaacttgttcgcgaagcaatcaaactgggtaacgaatacaacggcaaatggtacttcatcatttacgacgacaacgcagaaaaactggaaaaagttgaagatgcattacgtgcaatggaaactggtgcttctgttggtggtaaagtgatgacctgggaaaactactgcgacggttgcccttgctacaacgatggtttcggttctggtttctgggttgagattgaagatgttccggcgttcaaagccgcctggaaaatcgctaagaaaatggcataaggggaataacatgaaacacattttcagcaactacctgaacatcaaattcaaaactgacggcgtgaatgtctggtggtggtcaagcaatatcggtcaatggttccctgaattcactgttaccgccgaatccctggagcgttctgttgcaaatggaaatgcttctgtaattagcacgaattgctaaaactcgataaccctgatctgttattgtacacacatcgaaacgaaggaggatatcatggaaatcatctacaaaagccggaactacaaaaaagaagatgttgcagcagtttacatcaagtaccggaacgtgaaatgtgagtatagcgggatctggggttacgaaatcgttgttgaagaagtaaacgccgacaacaaaaccatttgcagtttcaccactaacaccgatagtcctctgttcactactgaacagcttgaacaggcttatgaactgcgcaaccaggcttttaacgcggtacgtatcaaatgagattccgtccttatatcgaattccttcgcggtatcagtgagatcctgaaccgcgaaattaaacccagtccgttagccgttgagctttatcgactggacgcaacccccgaagatgcagcaaaagattatggaaatgaactatgactactgaaattgatattgttgttgaacaacttgttcttgaagatcgtaaaataacactttcctattattcggaagatgggtgtgaatcgtgggatgttacgttcgaaggttctgattttggaatgggagtttcctttagtaatgaagaaaaagcccgtgaaaaatataaagaatattgtgttctttacggaaaataaaatcgcttgcgctgggtgtgggatgatgttatcttacacccatagaaatgaaaccggagattgttatgttaacttttgaagagtacaaagcaaagcgtgaccagttaagcaactggcacagggagatcggcagggaattgagcgcttaccctaaaaatgaaatgggtatgacgatcgaatcaatccgcaatacgccggaatacaaagcgaaacgtgctttatgcaacaaagttttccaacagcttcgcatccttaacgggaagtacattaaactgtacaaaaaagaactggctgacgaacgtaaactgaaacggagtgtaaaatgatgcagcacgaaataaaaacagagattgataaacgcatcttcctggaaaagaataagacggtaacgctgatgcattactccaccaaaaacgggtctagtgagttctggcgtgttaacattgacagcaaagatcagggaacatcaatcccgttcgatagcgaaaaacttgctcgtgctgttttccaatcccacgttaaattttgagaactatatcatggatattattgaccgcgcacaaactgtaatgaaagccccttcgctgatgatttaccagcagggtaatatgcgctttgctcgctctaagtggtacaactataatttcaatgttgacactggcgaattcgctcgttggggtacaacctttgcaagcgatccgacatacgcacctttccccgaaattctcgatatcgagatcaccacgaaatgcaatggccccgctggtaagctgtgtggtttctgttacaagtctaacaaccctaacggctacaatatggatctggaatcattcaaatctatcattgataaaatgccctggttgactcaatgcgccctcggtgctgatgcacagggacaaacaaaccctgatatgttcgatatgatggcctatgcgcgttctaaaggcattgttcctaaccttaccattgctgatgtatcaaaagacgttgcagcgcgtttagcggcggttgctggggctgttgcggtatcggtttataaacacgctggcttcgatgtcgctttcgactcagtagcgaacctggcagaagcaggacaacagcaaattaaccttcacttcatggttagctcgaaaacctacgatgatgcgtttaacgttgttgatgctgtgaagaatgatccgcgcctgaaacaagtaaacgcgatcgtgttcctgggactgaaacaaaagggacgcggtaagaactgggataccgttacccgcgaacagtataaaaaacttgttgaatattgcctcgattctggtgtaggatttggattcgatagctgttcagcccctgcattcgttgaagcgatggagggacacccgaacttcgaacagtacaagcagtatgcggaagattgcgaagcgacaatgtttagctcgtatatcaacgagaaaggcgaattcttcccgtgctcatttaccgaacgttgggtcgagggtggttgggccgaaggtctgaacgtcctggaagcagatgactttatcaaagatatctgggaacatcagaaaaccaaacagttccgtaaagaactgatcggcaacaaggaccataacggttgtcgtaactgtccggcttatgcggtatgtggtaaagatatgcgcgtacacaaagcccctgaaaccgatgtatatgcagtggagttaaaatgattattacatcagaaataaaatcgtatatgcgtttatatgcagaccactttgtatacaatagtaattcagaggtggaatgtgttaactatcctgttaacgtagagcacgttttatggattcagaccgacgctaaaattccttgtattaacaaaacatggaaacctgcgattacgtttcatttagcacataatcagtcggtaacgtgggctggatatgaatgtgaagaagaacgcgatgctgttgttgaatacatcatcggttatatgaatactctcaaatatggtggatgatatgatttatcaatcctttgacgattcaactacaagaatccgtcctgttccgataactattgacattccggcagaaaagcgtacactggaatcgttgattgaaaaatatagtgggatgaccatttgttctgctaccgcgataatggcaatgtcagaacgcgatgctatcgtatttgaatgtgatatgaaaggttatcacactcccgaagatatgcagatgattgattatctctggaaaatcagaaatactgttgttcgcaaaatccttgcggaaaaagagtgtgaggaagaatgcagcagaatcaaaagtaaatggggtgtgttatgaccgaaatactcgatgaactgatgtatgtgtatcgtgaacgttgtaacaacgggcgtattactgaaccgaaagcaaaagcgattatcgaaagatattggtctaaactgagagaacatgacgcaagttcaaaactgctcaatagtctgatggttctgaaacttctgatcgcttctggtgatgatatgccgtgcgatacaaacagcgcggaagagtttcaaaaagcgtatcgttcctggggtgtaatttactcccgctcgctgggttcgtatgactctattatgtggaacctaatgcacctggataaacttatttgggaagtgctcgaagaagagggtattgtatgaatctttctcatgaattaagcggggcaatccgcactattgaaatgatgcttgataaacttagcgcgaaagaagaattttgtgtaagtgatatcgaagcgaatttagttgaatggcgtggtgctctttatggagcaacaaagggcaatgatcctctgttcgctgaatacgatgtgtataacgtcaagatctggaacactgaatatcgtttcaagtggcctggtgatgcttacggacacatccaaacgttttacataactggtggtatggtgtttgctaccagtatcggggctagtgaacttccaataaacccagatagtaaagtaacgacaccgaaccctttcagacatactacgatttgtgttggtatgacagaggatttttcaaaaaattatacgggctggattgaagcccataacaccaacttaaaaagagtgtgattatgtttaaagttattggatgtgtattactggttgtggttctcgttttattgcaatcaagctgtaccgacgaacaagaagcacaacgtatcctggaagcgcaagggtattcgaatattcagttcacaggatatagctggttctcgtgttccgaaaaagacacatacgcaaccggatttacggctacgggcgtaaacggtaaaccgatcgctggtgctgtgtgctctggaatgtttttcaaaaatagcacgattcgtttcgaataagtgttgacatgaatccccagtatgataatatctctctcgtagacaacgaaacggattaaaggggattcaaaatgagcttactgaacgaaattctggaaatggttgaagcgaataaagaagcaatgaaagagaaagatggttgggtagttgtttctgactgcttcaaaccgagcctctggactccggtttatatcaacgaagcaggtaatgaagaacgtggtttctacgaggctgcaatcttcgaaaccgctgaacaggcttgcgatttctggtcttacctgagcggtgacaagcctttcaccaaatacggtgtttgtcagtgcaaagacatttaatcccagccccgaaaggggcttttttgtaggtgaaatatgaccaaagcagaaagaattattaaccatcttcaaaccggattcccgtaccagggagatctacagcgcgatatcatcgaactgttatcccagcatgacgggatggaagcggagataaaggaattgactcaccctgacgtgaacgtattcgcttcactgatggatgatgtgatcgctatcgactcggacgaactgatctgtatcgagacaacgaacccagaagataagacgatcctgaaacaagcgtatgagcggatcgagggattacacgatcgcctgttccagttaactttcccaaataaaaacgatagaccttgttgacatcaaaccagattatgataatctgtatatgaaaactaattgtgaggaatatattatgaacgcttttgaaaaacgtgctgtcctgaaagatatcaaacctggcgcaatcctgtacgaagtaatcagtatcactggtgaaaaggcacagatgggtcgaaaacatatcatcactggcttcccgcgtgaacatcgtgggctggggctgtttgttaacggaatcactgtgtatgatgattgggaaaataaaggtcaattctctctggatgatcgtaacgtaactgggcgcaaccattataatttccatgcgttgttccgtagcgaagcagatgcgcaagcatatgttgaacaaatcaataacgacaaacttcttcctgatgacaaacaggaaagtgttgaaatgacgattcgctggaaacgcgatcgcgcggaagatgcaatttggggttacatgtaaaacgttgcgcctcttaaaccgtaaataccctgtgtagcccatagggtattttcataaagaggtatgtatgtttaaatttagtcagaaaagcctgaacaacctgcaaggcgtgaagccggaactggttaaggtggtaaaacgtgctctggaactctcacctgttgatttcggtgtacgcgaaggtctgcgcaccgtagagcaacagcgcgaaaacgtccgcaagggtgtttcccagaccatgaactcaaaacacatcactggtgatgctgtggatctgtatcctagcgttctccctgctggctggcagactaacccgaaagtgtggttgcctgtcctgaatgcagtgaaacaagccgctgatgaactgggtgtaaaactgcgttacggtatcaactggaagaacgatccaaatcttcctattgaaacgaaatttatcgacgcaccacacgttgaacttgcataaggcgacaacatgatttcacaattctatgttgacgctgtaaagcagtcacgtaacctgcaccttgcgcgaatcattgatgggcgttgggggcaagaatgcggcggtgtgtctattttcgaaactgcgctggatatgggccggatgtcgggtaaaaccaaagcggctttcgatatcatcaagcagtcgaaagggacactgaatatctacgttgcgccgacaaagcaaatgggtatttgtgctgcggcagaacatggaatggataagggcgctgattcgtctttcattctgtcgaaacgtcaagatctgacttccattttccgtggacaaacgatcaagtatcaggcaatcaacctgattttcgatgaatgcgacatgacgatcgacgaacggtttgaactggcaaaaacactgaccttgtgtatgcgttcaagtcatcttcacccgttcccatatatccatattatccgtttgggtatgtaatgaaaagtcatggttattcatcaagaaccatacaggaagagattcaagggattgagtctcttctgagttatgtagatgttgatacatctacgggaaaagtgtattggaaaattcagcgcggccctatgtctcctggaagtgaagccggaagcaagaacgagtattcccaaattcattttaaaggttctatgtatttgcgacaccgaatagtgttttacgttgagaatggttatcttcctcctatcgtagatcatgtgtatggtgttgaaaatggagatacagcaagaaatctacagaaagcgacgaaccaacaaaacgcgatgaaaaagaaatgtaattcaaacagcagtacggggttgaaaggtgtttcttatcacaaagcaaatgggaagtataaagcgcagataaacatagatggaaaaagaaaatttttggggtattataccactccagaagaagcaaaagccgtttatgaccggaaagcgaaagaggttttcggcacattttttaacgaaaccacataaggttaatgtatgtcaaaatacgtattagacaccaatgttttgattagtaacccatattcaatctattcttacatcgaacctgacagcgaaatcattatcaccgctgcaacgatggaagaactggatcacctgaaaagcaaagagcgaaccgctcatgaagcacgactggcgatccggcttttgtccaaagcaatcctgggacaaaattatgaagcaattacccaaacaggggtttcgttaaacttatcgaacccagcagtaccggaaagcgtaacactgaaaatcgtcgattatgacggcaccgaagaattccctctggataaacaggatgcgcggatcattgcaacttgtattcagcagggcgcaactctggtgactcgtgacattaacatgctgttgatcgcgatgtctaaaggttgttcggttcttcaatacactggcgatgactcgctgaaagatagtgatgtgttgtattcaggttatatcgacctgcctctgttctgggaaactgttgaagtcctggagtatgtcgggcctgttgccgttataacgtattcatcgcttcctgacgcggatttctaccctaaccaatacattctatcgtgtggtgagattgtagggcgtgtggtgaatgctggagagtttcagcttgaagtgttgcctattaagcacgaacaggcgttaaagcgtaagctgatgaaaacaatccagcctcgcgatgctctgcaagcgtcattcgttgatgctattctggacaaaaacaatgacgttgtgaccatcatgggcgcggcgggttcaggtaaaaccatgctggctgttgctggtgcaatgcacatggtaaacgcgggacacttcgcaaacctgatgtatgtcaaggcagatagccctctgtcgggcgaaatcgggttcttacctggtactcttggcgaaaaactgcgtcctgctgtagaaccatgtattacgagcctgaacattctgtttaaggatcaaccggaagttgacaagtacgttgaaggacttctggaaaaaggtgtggtgcagttccctagcctgtattacttccgtgggcgttcaatcggacatccagatccaggtaaaggttccgtgctgattgttgacgaatgtcaaaacttgagcaaccatgaaataaaatccattatttcccgttgcggtgagaacacacttctgatactatgcgggaacattaagcagattgacaacccgcgaaacactgcggttaacaacggctttgtgtatgctgttgaaaaacttaaagaatatgaccatgctagtcacataatcctgaatactgtgtatcgtggacgcctggctgcattcgtcgaagacaacttttaatcaaaggggcttcggccccttttttgtgaggtatacatgatcaatattattgtttcgccaaagctgattactgtttgcgaattttgtcgaactgggttagaatacgaactcgacgacattcagcgcaagacagaaaccatctataacgggttttatagtcctgctgattatatcgtgaagaagttcattacctgcccgaaatgtggtagtaaagtaaatttaaatctgaactgaggttattatggtacaagttgttagcagacctacagaaaaggaagttacttgttcgtgcggagtggttcttcggtatcatccttctgaggcgaaagtaaaagagatatcttcggaagggtcatatttctttaatatggaaacgatattgtatatcgattgtcctgtttgtcataaacatgttcgtgtggggaataattatggtacaagttgttaaaatgcaaccaaaagaagtcatctgtcggaaatgcgaaacacatctttcctacgatgctactgacgtgcgcgaagaaacgcatactgattacactggcggtcgtgacacctacagaatgatcacctgtcctatctgtcataataaaattgtggtgaaatgattgcataaataataaggtgagggtatcattgccctctcttgttacaaaaggtattaaacaatgaagaaaattattttagcgaccagcattttcttatgctctttttctggtcacgcaacgactgatccgcttggaaaatttattgaagaacttcctgctgtaaagtcaacattaccgctacaacaagcaacagtgatcaagaaagcaccagccaatgcccctgcatatgtcaaggaattggatgaaattacaccaaagcagaaaaaggttttggagtatgctttcagagttggaaacgactatgatctaaaaactgcaaagcctgttgaaacggaaaaatcgaaacgtttgggatatcatttagcggctattgcctggatcgagtctcgcgcatgtgagaacaccggaaagggcaaaaaaggtcatcatgcttatggctgttggcaagtcactgtaaacagtgcttccgcacggatggataaatcatattccaaacgcgtagtaatcaataagctcgaatcccttcggggaggttctaagtttgccattcatgaactggaatactggcttgattaccacaaaggcgacttgaaaaaggcgctcgcgagttacaatgctggcttcaagtatactaagaaagaagcccgtgagtatgctcgcatggttaaccataccgcgaaactgttagaagaaaagcaaattatttgatcaaaagcccttgcatttttgcaggggcttttttattatatgtgcatcaattattgaggattaaatcatgagtacatcacatcgagttattgtcggaaaatgcggtctcattaaacgaaacgcattgagtgttatccaatcagttctatccgaactcaaaaatcaacctaatgttaaaattctccagatcactgttgataaagacagtatgaaagcatttaacatttacttcgaatacggtgaagaaaagcgcaaactgtttgtgtatgaaagcgatgatgtgtatcgcaatatagaagactatccgatcgaatgtgacctatacttcaatctgaatgtatggggtagccacatagagatcatgaacatcgtgaaatctggcattcgtaaagcggtacgcgctgggggaatttacgaatgtgttaacgatgcaatcgaagaccgctttgtttacgtgttgggagagtaatcgtgaaaaaacttgcgctgctgttgactttagtttctggtttcgcttatgcggatatttcagacaaccgcctttctgaactttgcgaccatcgcgacattaaagatacttcggtatgttaccaggtgatcgcggaacaactggacgctgcttatgtctggggagaagaaaacgcgcatttagtcaaacgtcaaaagctggctaaacagcgtgagtttttgcagtctgagccgatgatgaacctctgtacccgcgcaccaaacaaggaacgttgtgaaaaacttcgtacttacctggtggatgaatataacgctggaataggattatattgatgctaggactaattattttttacggaatggttattgctgttggaattatcatctggtactgtttaatgaagccaggagaacgttcattacctgaatacaatgatgatcttgaaccgtggcaacgatgggatgaacacatacaatgagcataggtctacaatttactatactgatcagtgttgtgattttaatggggctggtcattgggatcggctatagaatgggtaataaagaatgattcagtcagacaaagaaaagctctatcacaagatcgagcaatttgctaaagcaagggatcgtttccttgacggtgaagccaaagcatcacaagaagcgatggattggtgggatgatatcgttgcttttgtcgatgatttaatcgacgtagaacgcaaagaggcgagagaatgagacatcaagaagaaaaggtgttaaaacataagctgaaagaactgggagaactttaccaggactacgcagcagaagacgatccagattcacgcaacctgaacatgacatatatcaataacatggttgatgacattatcgcgttcgttgaaaaagaagttgaagacgcggtagaagatgctattgcagaggaacgttctaaacatggctaaactgtattatcactacgcatcaatgaacgctggtaaaagtgcgcgactacttacagacgcatacaactacaaagaacgcggtatgaacgttgtgatctacaagcctatgcttgatactcgcacatcacacactgttgcttctcgtgtcgggttaagcgcaacatgcgaattgattgcacctaatatggatctgttttgggatatccaacgccggaataacatttcgtgcatctttgttgatgaagcacagtttctttcaaagagaaacgttttcgacctctgtcgtgttgtcgatgaactcgaaattcctgttatgtgctacgggttgcgcacagactttcagttgaatctgttcgagggttcttactggttgcttgcctgggctgacgagatccgagaacttcggggaatgtgtcattgtggacgtaaagcaactacggtcgcacgtatcgacgcacaaggaaatttcgtaaccgaaggggcgcaagtcgaaatcggggcagaagacaaatacgtttcgctgtgtcgtaagcattatcatgaaaaagtgcttgataaagttggcgtagactgttaaggtgtaatcagacaacaaaggagatatctatgagccgtacttaccgtaacaaatatgttcctgtccgttccaaagaatcaattgagaaaattgaagaatataaagcctatgcagcatattactctgctaatggttgtgatcctaatggtgggcgctggttctctacgaattgccagttgaaagtaggttgtatgtatatgcgtttcgataaaaacgttacgcgcgacggtaacaaggcacatggtgatatttccgctatgctcaacatcgcaaagaaacgtattgattcaaaagttcgtgaaaagatgcgtcaggaattgcgccggatgaaagctggtatgattggttgggatgaaaatgtcgaaaacgccaacaagatccgcgctcatgaacgtggtttatgctggtatgacataacgtaattatttttagactgatttgacataaggggcttttagccccttttttgctataaatatatacaggaatggatctattgttgatccgtaagcacttagagaattgctatgaacattaaacgcatatcaaaagcgctgatgtttggtttgttaatcttgtctccagcatcacaagccgacgaccgttctgttgtcgcgaaagaattcgactactacatcaatgcagcgctacaggtgtatctagacaccatccctcccagcgtaaataccagtgaacttttctataattacatggaacgaaaatggcagcagaaacagtgtaaatccgaacctgaatgcaaacgcttagggcttagggtagcaactgaatttgcttctattcaccgttcataagggatgaaagatgcagacgtttaacgaagttgtcgatcgcgataatgcaagtaaaatagatgcctttattggcagatgcctgatgtccgttacgtatatgcacagcgcacactttgctactggttcatattcgcaacacaaggcatacgagggtttttacgaagatatgcaggatttagttgataaattcaccgagatccatataggcattacaggacgttataaacccgtattaaaagttgaaaatatgcttgacacggtagcgtatctccgtaaaatagtcaccgaagccgaagaaatctatgattcagtagacagttcattgaagaacatcctggacgagataaaaggcttgtgctatcaaacgatttacaagctgacaaaactttcttaaaaagagtttgacaagcgaaaaagtgatgatagaataactatcgaattgaaacataaacccaaatggaaataatgatgaacttaaacaatatcgtaaacaacccaatcgtaaacaacccaaagaaaaccactctgatcgctctgggcgtaatcgctgctctgtggctggttccgaactcgtacacgatagttcaggacggtacggtaaaaactcaaaccttcatgggtaaagtttcaccgaaacctgttctgcctggtttccacctggtaaacccactggctgatttcgaggtgttcaacaccaaagacatcgcaatgaagtttgacaagttgcaggttccgtcccaggataaattcaaatccactgtggatatgaccgtgatgttgcagttcgatggtaacaaagccccgatcaaccgtatcaacgcgggtaatcaggatcaggcgcttgataagtacgtgaccgaaaaacttctgtctaccgtccgtgagttcggtaaatctgtaccaaaagcacaggatctgtataacgcagaagttcaaagccagctacagaccgcgatccagcaggaagttgaagagtatgcccgtccttacggttacaccgtgaaacaggtattcttgcaggatatcgacctgccagaagcgatcaagaagcaggttgaaaacacgaaaattcgtgaagaacaggtgaacgcagagaaagcagaactggcacgtaaagagcaaatcgctcaacagaaagttgtgcaatccgttgctgaccgcgaatcccgcgccaacgatgcacaggctaacgaacgtgatgctgatgcccgtctgtatgcggctaagaaagaagccgaagcaaacgccattctgcaacgcacaatcaccccagaaatgatccgctggaaagaacttgatgttcagcagaccatcgcggacaaatatcagggcgatgtacctcagactgtcatgggttcggattacgctggtaaagtgattttcgattctcgtaaataagggtttaaagccccctctcctgggggcttgattcttaaaacgagaatactataatgaacataaaacaggctatactaactatcttcatttcgtcattcttcggctttattggcggtttgcttggtgtattgattattgcgtctgttttatgattaccctttaaacgtggagcacgttatgaaatacaaatttgataaagctgtcgtaattggcagattccaacccttccataatggtcatgcagcgatggtgcgtaaagcacttgaagagtcgaagaccgtttacatccttctgggttcagcttacgcttaccctaacgttttaaacccgctgacggcaaccgaacgggaacgcatgatcactagctggttactgtctgagttcaaatacgaagatgtatcccgtgtgcaattcaaacctattccagactacctttacaatgaagaaaaatggaaaacctctgttcgtacagcaatcgaagaaaccaaaggcgataatatcgcgatctacggttacgaaaaggatgctgattcgtactggcttaaagcgttcggatggactcatgttcctgtagaaccggttaaagttgatggtaaagatttgtctgctaccgatctgcgtccgaccatctttttacataaaaacgggtgggatgaaaaaatcgcacgatacgcaccacgatctactgtgaattatattgattcctggatgatgaccgatacattctggcgtttgtattacgagttcgaaaaatgggaagacgaactggagaagttcaaaaactacccatacccagacgcgttaaactgctgcacgggtgatagcgtggttgtgtgtaacaatcaccttctggtaattcgtcgtaagtttgcaccaggtaaaggcgcgttggccctgccaggtggacacaaaaacgcaaacgaaacattcctggattgtgcgatccgtgaattgctcgaagaggttcggatcaaggttcctgaaaaggttattcgtggttcaatccgcaattcgatgttgttcgaccatccgaagcgttctgtacacttctcaaaaccgactgtggcgcagtacatcaagttagaaccgaacaatgatggaagtctgccccgcatcatgggaggcgctgacgatgcagcagaggcgttctggatgccaatgcacgaagtcaaacagaaacgtggtgagttcttcgatgaccactatcagattatcgtagcgtttacgggactctgataaaaagattaaaaagcccttgcgttcgcgtgagggcttttgctatattagggacatcgaaacgaaggaggtaattatgagcaagaaatcagaagtagccgaaatcaaaaaacttgatgatggtaaaatcgcggtacgttggaaaggcaatcgcaaattcaatgtgattgaagatcccgaagtcgctgctttcctggtgttcatgattacccagaaagatacattcgttcctgatccaaacaatataaggctggctgattaatgaaacacccttactgtttggtaagtcgtccgatttgtgcgggtggcttacctgttaactgttggcagttgattgaaaaaggtgacgcgttcctgaataagcgcggtgataaagtgtttgtgtatggtgttgactctatcgaaaacgaaacgatggttatcaccgatgaaaaaacaagtgaaaaatatacgttgacttctgatcatgattgccgtaactttaacgtgtactggaaatctgatgaagaatttgagaggaaatcattatgaacaaaactgcatttatcaaaacagaagaatcgaaagttgtccgtcgcgctctgatcccaggtgatagcgtctatatcaatcactcgaaatctcgtggattcaaagaatcgttcaccgttcaatctgttgcaaaagacactcaaagtggcgtaccgattactgtgtatgtgtttgcttccgacacacgtactaaaaccgcatcaactatcatcgctaaagtcggttctggtgatgaacatatgttgatttccgatagtgtgtattctgtgaacattcatagcattgatagccgcgatgtctctgcaaaagatacaacggtcgttgttgatggtgatcatgtattatcgttcgcgctcaatactcgcgaaaaggtagaacgtcctgttgctgttggtgatattctgaaaacagaacgtcgcacataccaggttgaatacatcgctaaagatggttctttagtgtgtcgcatgtactcccgcaaagataaagattcttatcagggtatggctattattgacggtgttgaccgttctctgatgtctgcactgtatacgaaggtgacgtttaaatgaaacatgccagaagtgttttgatgggtgatgttatcgacatcaacgggaatgattactacgttgcggaaatcaacacaaagggtaatcgtgagatcctggaactggatattgtgaaatctgcgatgggtaaatcacttactatcgaactggtgcataatacgaaaactggtgagaatgtcactactccggtattgtctaaacttcctgtgttttattgtgaaaagaaaaagtgttggaaaatgaaatgactgatttaagagatttgtctgatgtgaaagtgggtgataccctgtacgatcctggcgtaagtcaatacaacaatcgaaaaactgcgaatcctcgcgtgttccatgtaatcaaggttgctcgtcaatacttgtacgcatccccgaataataagaatgctgatttaaaagattggaacgttgagaaagtcgatcgtaagtgcgggttaacttctggtactggcggtggatggggtggattctacatgtatcgcagcaaaacagtatatgatgaaattcaatatcgtgttatgctgtctgagaaaattcgaaaagaattcggttctcatagtgttcgtgttcccgaaatcgcgacttttcaactgaaagatattgcaaagatgttaggtattgatacatcggagagtgaagaatgaaaattgtaatggaaactgtgttcggttctcacctgtatggactaaacacaccgacaagcgacaaagactataaagggatctttctcccgcatccacgcgatattctgctgggtaaagccccgaagactatcgacacgagcacgggcgataaaagttctaaaaacaccgtagacgacatcgaccgtcagttgtatagtctgcctaagttcattagccttgcatgtgatggtgataccgtagcgctcgatatgcttcatgctgatgatagtaagctgatcgctaactccgaaatctggcagtatatccgcgctaaccgttggcgtttctacactacagaattaactggcctgttcggttatgttcgtaagcaagccgcaaaatatggtgtgaaaggttctcgcctggctgcactgcgcgaagttgtcgatgtactgaaagaaaccgaaacgatcggtggtattcaggaattcacgccagatatgaaacgctatacgcgtgaagtgaaagtgtctgacatcaaggatcgtttccctacaaacgagttctgccgattcgttaccgacacgacaatgaaatctggttgtcaggacttctatgaagtgctggggcgtaaattccagttcacgatcaaagccgatgaaatgcgtaagtctgtgtataaactctgggatgaatacggagaacgcgcacgacaagcagaagccaacaacgggatcgactggaaagcattaagtcacgcgttgcgcggtggtatgcagttgatccagatttacaaagatggtgatatcgtttatcctctgcctgatagcgcattcctgaaactggttaaagctggcggcgtaccgttcgcaaccgtacaggaaaaactggaagaagttatgggcgaagtcgaacgccttgcagcgatttcaacatatccgaaagaagttgatcgcgagttctggaacgatttcatcgaacgcatatacagcgatcatgttgtggggtattacaaatgatgtatcctaaattgtccggcgctgaaattgatgttctgtataaactttacggatacgcaactaaagtgctagacttagatttcaatgacgtacccagcaaatcagggcgtgattccctgattcaaaaaggttacgctcgaagagtaacgggttatcacgataattcgaaagcatggttgctgattaccccactggggattgacgcataccgacacggtattaaaacggagtggcactaatgactgatgttattttgaacgttaaagatgttgtactgggcgataccaaaaacccagacgcagttacactggaacaggctgttgttcagatcatgcgcgatagcctccgactggaagttactgaacgtaccgaaagcaattacacgggcgggattgatggtcgccagttgtacgaagatagcaaacacgttaatgtaaccctatgggcggacattgacgaaaactcatacaaaatcgacgagattgattttgacgtatgaaaataattgacctctgcgctggtgtgggcggggttcgattaggatttgataaggcgttcggcggtgtcgaatgccttttaacgtctgaaatcgacaagttcgcacagcaaacatatatcgaaaactggggcgatgataacctacagggtgatctattcgccattgatgaaaacaaagtacctgatcatgatatcctgctcgcggggttcccgtgtcaggcgttcagtaaagccggattgaaactgggctttgatgatgtacgcggtacggtgttcttcgaaatcctccgcattatacgcgctaaaaagccccgtgtgttgttctttgagaacgtgcctgaactgctaacccatgacaaggggaagacgtttaaaacgatttacgggcttctggaggccgaaggatataacgtattctatcaacgcctgaacacaaaggatttcggactaccccaaagacgggaacgcgtgtttattgtctgcttcctggatgatgtattcttttcgtttccggttcccccgcgtacccctacacgcgtaggcgacatcctcgaagatgctgatgattcgttcaccctgtcagataacgcatggaagggctttagagagcgtaaggaacgaaataaggcaaacggtaagggtttcggttatcaggccgtcacaagcgattctacgcacactgggactatcacccagcagtattacaaggacggcgttcaatgtctggtgttgcaggaaggaaagaaccccagaagacttactccccgtgagtgttttcgtttgcaagggttcccagattcatttatcataccggatagtaaaaaacaggcatatcgtcaagcgggaaattcagtttcaatacccgtgattgaagccatagcgaaacaaattaggaaagtattatgagaaatcaaccagaaatcccgatcgataccgttgttgaatggcattacaaccactgggataatgatgaatggtctgccagccagggcgtattgaagtatcataaaggaaacttcatcctgatcgaactcgaaggtaagccaaccgtgctggacggtaaagatttggtaatgcgtccgtacaaagaaagaccggaaacaaaattcttcaaaaaagtgtttgcatccagtagttgatagtggtatcttagctttaccaaaacgaaactgaaaaggaacataccatgacttttaatgacctgtttaacggatgtactggcgctggtgcgaaatttaatctactgaaagattacccgctgggttctaatccaggttacgtgatggttgaagtgcgtaacggtgaatactacaacgtgttcatgtgggatcgttctttctcttactgctggttcggtgcgaaatacaaaccagattacatcctggaacaaatcgaaacagtgaaagcgaaaaaccctgaactgtacgcgttcgcagagtctattcgtggtgtgttcggacactgattaatcaagccccgaaaggggctttttcgtgaggaaattattatgatttacactgttgaatgtttggttgattatgaacctggtaatctgatctgcgcgtctgataccgttatggactgcatcgacgcggtgaacaatcacgaaaccttcccgtatgttgcggataatctgcatttcactgcgtggaaagacggcaagaaagttgcggttgcttctttagtaggaaacagagtaggcgatacaataggcgctaacggctatgaacctaaccctgtgacatacgaagaagtcattggtaaaatggaggcggtatgaaggttaaaaacgccgaacgctgggagaataccaacgaaatgttcttcattcgttgcaaccgtaagcctctcaaatgcgggtatgacgacatagacgaagccctgagcaagtttaacgaaatcatccgttcatccgtctaccgtagcggggaacatcctggcgacctgtgggaactggtagcaaaagatccttacagtaacatcgtcctgaaatctgaaacaaaaggtaaagtatcgtgaaaatttatactgttgaaagtttaagcgaagattactatacatttagtgatttggtcggttctaccgtatcgctggaacgtgcgattgaaatggctaaaccttttgactgggtaagtatcactgaatgcgacggctttactggagaacgtctgcgcatagtaacactgagcaacgaaaaagccattgcgaacgcaaccaaagaaaacttacaatttgaggatgtaaaatgaaaatccgttctggttttgtgagcaacagttcatcaagtagtttcatcgtccggttcccgaaagatccgactaatatcgacaacctgcgcgaaatgatgggtgattgcgttccgaactgcggttactacaatcctccgttaacagcggaagaagtggtcaatcatgttcaccgtgacttaggcggtcatctgggtaatagctttgaatcgttctacgacgataaacgctatgactgggaaaccgaagaaagcgcagaaacccgctaccgttcaaaccctcaaattgcgcttgcgtatgacgggcgagactggtacgatctggacacagaagagaaagacgctctgatcaaaatgtggttgtatgaagagtacaacacgaagtatggcaatcaggacggcgtgtttatctatgaattcacgtactccgatgaatgcggcccgatcggaactcaactggaacatggaaacatcttccgtaaccttgaacacacatcaaagagtcatcactgatggataagttaaaaaccgaagtctgtgttgttatgcctcgctatgcattaggggattcgatcccctttagccaggatcgccccgcaccgtttgatgtattttctttgcgaaaatatcttgaacgttttgaactgaacgagtatactctccaaatcgttcgggtatggaatccggtaatgtatgcgcttgcgtttgacattgcagaatccaaactcactacgatggatgaatacgttgaactcctggcgcgtaagttcgggtgtgatcgtacagtcgaagcagtaagcaataaagttaacgaaattttagaaaaattcaaatacgagaaaatttaaatgtcaataacaaatatcgaattcaaaaacgctgtatcgaagccaaccccgacaaaccacgttttcgtgtgtgacgtatccggttcaatgtataacgaactgcctaagatccgtaaacacctgaaagcaaatctggcgagtctggttaaacaggatgacaccgtttcgatcctgtacttctccagcaaaggcgattacggcacggtgttccgtggtgagaaggttagcaatgtctctgacctgtctaacatctgcgcggctatcgaccgttacctgaaacctactggttgtactggcttcgttgagccgttgaatctggctgcggaaatcgctaccgatctgcaatccgaaaacggcaacctgaacagcctgatcttcctgacagacggttatgataactgctggcgtaccgatgacatcctgaaagcgtgtgcggttctgccactgactttcaacagtatcgcgttcctggaatacggttattacgtgaatcgtcctctgctggaaaaaatggcagaagcaaccaacgcattacacaaattcgttgaaggtttcgacgcatacgaaccagcatttgccgaaatcatcactgcgcaaacttctgcacgtatcgaagtcaaagttgctgacgctacccatgcgatctacctggacgaagggcgcgtgtatgtcctgaacgctgcaaacggtgttgtgctggttccagaacacatcaaaaacatctgggcgctgggtgacaacgcgatcaatgatgttgacggcttcgatccaaacatcgccagtgaacagcaagttctgtatgtcgtgctttatcatgcactacacacaatgaaccctgatctggcatggaaagtgcttcaaaagctgggtgatgtccgtctgatcaaagcgtatgacaactgctttaccaaacaggactactccaacgcaaaagacctgattgcacaggctgttgtagatccgtcacagcgttttgttgatggtattgattacaacatggttccagacgaaaacgcgttcactctggttgatgcgctcgaactgctggcacaaactgacacagtgatcgacctgtcttctgagcactgggcgtacaaccgcacaggccgtcagactgtacagaaagaagatgatacactggatcaactgtctgaacagatcgcaaacgctgcaaccccagaagaacgtaaagcactggcggcgcaaatggtagcgcatgaagtatgggttccgaagttcacccagactacaaccaaagtatcggttaaacatctggtgggtaacagttcccgtcctaacatttccatcaacacggatctggaagggtatgtgactatcccagaaagcaaacagaaagaattcggtctgccggaaaaaatcgaaactaagcaggtgcgtaacttcaccatcgttaaagatggtatcgtgaacgttaaagttctgccgctggaaaccgatattccgacactgaaaaaccttcgtgcttctggcctgactatcaagccgctcgaaaaaatcggtgatgatcgtatgtctgttctggtagactttacctctctgcctctggttaaccgtggcatgactcgcgggttaagcggtaaagagttcgtgactgataacgtgcgtctggaaatcctgaaaggccgtcagaaggttatgaagttcttccgtgacaacgcgatcggactgcgcaacgcagaagggctgaaacagcgctttggtgaggctgcgggtgaatggctgtctgaacagggtattcgtgattacgggttctctccgaaggttgagcgcacagaatcgactgatgtttacatgtcgaaagaactgaacgtgaaaatcaagggggtttcctcccttcctgctgtagcggctaccgtcgcgaagcgtgaagaaggtaagaagaaactgaacaacggcgacctgattatcctgtgggcttacgatcaggtgaaatctgaactggatgcgcttgacaaagatcaggtagtcgagtatcttgataagcagacaaaggcaacgattcaggaagtccgtaaactgaatgctcgtttaagtcgcgtaatgtacggtgttgtagtagcacatgcatggttcgcggatctggacttcgaagaaaccaaagtttctatcgctgcgaaagatattcttccgaaagaagataatattccgtccgatttctggaaagtctgggaaaccacatcattcgaatgtgaaattgtcctggaagaaaaagaagtcaaaatctaacaatgtccgcccccgaaagggggcatattgaggaaaatactatgtcacgtaacgtattctggggtgaagttgtaaaaggcgatatcctgtacctgtccgaaccacaagcctatcgtgaaaacaacgaaaagaaccacgcatacgcgcctatgctgccggatttcgtggttgttgatgatgtatttgtcggtgaaaatggctggcagatcgatttagtcgggttcccttacaaaaagggtgcaatccttctcgaactggaagaccataatttcttcgcccatgttggcaatatcggagatcatggtgaattcggtatcgaagatatccgcgaaaacccgtatgtattcagcaactactacaaggtcggcggacacctgcgcagtgataacaaaactgttctgtatctggatggtcttctgtctggaatgcataatttcagcatcgagaagccaggcaacagcgcagaactctaccgcctgtttgagaagtacaatcatcaagatggtaaactgttgccgtcagaaatggcttacattgtcaaccgtctgatcatgggactacacaaaacattcctgattcactttgacggtgatgtacaacaggcgatggaaactgtgatcaccatcctgaaagaaaaatcacgctgcatggataccctgtcaaaatgactctattctttatcattgcattgggtgtgtttattctgggcgctgcgatttcattcatggcgttcgataagcgcgaatatcaaatggttgtcattggccttatcgtggcaagtatcccgctggtgttgtcatacaacctgtatcatgagaaaatcgcggagaacgcgaaatatgaggcaagacgatgaagattcgttctgggttcgtgagcaatagctcaagcagtagtttcattatcgggataggacttgtccgccctggtaaagaacaggaagttgcaaagatttacggtgagtcaaacgttgaatctctgatggatatgtttgatgatactcgtcctcgctgggatttacctcaaatacacgatgacggcacaatcacactggaagcgttcggatgtaatagcgtagaaataacccgcatctgggacaagttgaaagaactgaatctggatgatgttaaaatcgttcacttcaatgagtgcggcgacgaaccggaatacgacgaggaaaccggaagttataactatgactggtatgacgacgcggacgcattcgggccggaactcgaaaagaaatacaatctcctgagagataaccgcgaactgttcattgaaggtgatgttcgttgcggtggtggttatgacggctaaacgattggtgatctgttatcgctgtttgcatgtgtatgatcacaacacagcgaagcgaacagcaacaaagcgcttgcgcgttaaagaggcggaatgtcctctctgtaaatgtaaaatctgtttggggtaatccatgataacgatagtatactgggaagaactggaaagcgaattcagtgatgaagctggggaaatggctgctgtagcgggtgaatctgaaatgcttacagctaccgaaagcatggatgatgcatttgatcgcatcaagaaacaccagaaagaaaacgaaggtcgggatattcagtacatgctatcgttctggctggatggtgaaatcttctgtcatgctgctattgctgaggatactccggtcgatatgtgtcgtgaagaaatcgtgaagtacgtcaaatcttttatgcattaattaaatgagaattgaaaaatggcttatgtatctaaaaaaattgaaataatttcgtcgatgatgggtaaaactctggaagagatcgaccggattgggaagaactttaaagatgaagttttccgtttgcctgaacgtgaaataaatttaatcccgtatttcaacacggttaaaattctgatcgatcctagttttggtctaacggcaactcattacattgtcggtaatgctccatatatgttcgtgttcagaaaatctaagttgattgcgtatttcgatcgcgcgaatcttggacatgttcgggcaatcatcgaccggatcgaccgttatgaagtagggaattacacggaacaaaccagacgcactacatacggaaagattacgagtatgctggaacaaaccaaacaattcgacggagccaacatcgaattgattgatgatctgctaaaaaggatcaacaagttcaaagaagcgtttgacgtaaagaaaaccgcgcttgctgaaccagaaacggtgaaagcgccaaccctggcatctttcgaagaaccagaaaccattccagtaaacacagcgttgaaatacatcatcgaaatcgaaccaaccgatcttgatgcaacatgtaaagcattgaattctatagggattaatttcactctctataataaattcagttaatccaaaaaagcccttgcgttcgcgtgagggctttgttatattacacatatcgaaacggaacagccaaaaggaacgagaacatgaaagctaaaatggtgaagttcgtaaaagactggagaaaaggcgcagtaatcggtgagagctacgtaatcgtagacatcgaaagcaacctgctcgaaggtgcgaacgttttagaagttcctcgttacggtatggttgaagccgctgataaagcaaaagaactgaacggttacgttctccacatcatcgaagcaatcgagaaggaattagcatgaacagcgtttatctgattgaagaaaccattatccagccaaacggcggagtgtatgaaaagaatatcgtgtgtgctgccctggatgaacaagaggcagatcacaaagtgaaatatttaaatgaaaatgctgttgtatgtcagacgtattccggttatagtgttgcatatgcttggaaagcggttagtttagaaacccaaccatcttggttaatcaacctgaaaaaataaggggcttatcatgaaaatgaattacgttcgcggcggtatcatggcactgttactgaaaggtgtttctcgtagtgagaatcgtatgggtatggggccgatgggtaaagtctggtctgtctatattggcggtgactgtatcggttacatcggcaatgatggattgagccgcgtttacctggctatctcaagcgggggtcgtgaagtcgaatgtggtaatttcatgcaagcacttgcgcagttcattgatactgcgatcactcagattgaaaaacagggctgcatcgaacgccgttacgcgaacaagatcggaatgattgaatattccaacttctgcttcgaagtcgaagaagtgcgttacgacactatggacgaagtatatgaatatgtgcttcgtggtgaggaagtgattaagtcctacaacgggacgaaggttatcaataaccgctctttcatcaccccgttcgaattgcgatatcaacagctaatgggctggatcgtgatggaataagaaaagcccctttcggggctttttgttatgaggatgatagctggagtttgattctttctacttcttccggttcatcaatgatgctgtagtaaatcgtcacggtgattgcgttttcgtcatactgcggaatcacttcaacatccagattgtaaacacggggttcgtatgcgcggatcgcggagacaatcgaagtccttactgcttccgctgttagcgggttcatgttctcgaaaatctgttccccgatctcacaaccaaagttgctatcgaaaggccgtgtgcctttttgtgttgttacgataccgatcagactattctttaccgctgccgcccctttcgaggcggttacgtcattgttccagtcttttgttaagttgggatcgatatcgctatacagtaagcgaaggttaacacccattttatccaaccacctttagaaacgcctctaagcctctcagtgcaacgatatgctcgtagccacacgaacaccttaccggaatgtttgcaacgattgctggcttatccagagcgctatttattgatttaaagaccggatagtcgatactatccagaacggcttctttctctgactctttacagtcatcccataagatttgttcaccgtcgatgactacaaacttaatcagttcgggtaactcttcctttccggtgcggtgtggttcgactgaaatcttgatctcattgccgtacagcttttcttcgtattcatccaccatgatatgatgacgattgagcacaaacttaatcagttccccgcattcagggcatttgatttggagatctacagtctctttgttgatactgtcgaacagagccataatgtaaacataatcgcgctgatgcttgaacacatcaccttcaataatgaagttatccgtgtcatcaagatcgccaatggttaacgggcgataagtcacattatattttgggatatgtcggggtgtatgtttacgcatttgcattctcttttcgtttcaagtcttccgccagcaatgcaacgtaaattgaacgttccatcgggcttccattcattataggttcaatctgtacggtattcttatttaacaaatagttggttttgaagaactcattcagttctgatttgttgaacaggattttgtacagtgtcaataagtcgctgaactcaatatcacgcacggtaacatgacaggacttgcgtaacagtttaacgatattttccatatcttcaatagacaccagatccaggatcgcgttctttgtatcctcgtctaatgcattccattcgtatctttcgccgtcctgcttgacatactggatacattcaaggaataattgttcactgttgttacgatgtttcgggaatttgaatcccagagtaagcgaatcatcaagggcatattcattttgcaaaacgtaatcagttacatgcatgaatgcttctgattgtccgctgcttcctttgattcggatctttattgcgttcttaccgaacgatacacaatacaccttagtgaaaatgttttcctgttcggtgcgggaataacccggatacagaatatctaaaatttcatccagcatttcttgctgttctgtgagcgtcttcccttccatgtccgcgcttgtgagtaagaaactcaactgatcgcgcacggtaaacatagggaatcgcttcactccaccagggagttttacgcggattatatcaatcattttaacctcaaaaggggctttcgccccttattgtcctgtaaccacaccacgaacggcaattgctgtaccttcgataagtgattgtttgaatccgtcccaaccttctttatctgcttcaacaagccagcctgttttataagcaaagtcaacagtgaatgtccagatttcgttattgctttcataactcagttctgggttgctgactttaacaggcaaacacttctggaatacatacgtgctgtgcgggacaccatcgcgattgtgtaagtttacctggatcgcgcttgatacttcatcaatgaatgcgaactggcctgagacatcatcacgaatagctgataaccattcgttgaatactttcaggttacgcgcttctgaatccacacggaacgttagcgataattcaccattctccggtcgggtgaatcggatctggggtacaccgccattatacacgtattcataacccagtgttttaccaggcaactgaacaccaacgatgctcaaccccatattatacatcattttgtcacggaattctgttagcatctgtccgtaaacactatcaccaaacagggaagtaattaaacgagggcttaacgcccccatgattttactgaaacctgttttgttcagggacataatagctttatcaaccgtatagctgaatagcttgcttacgccccctgtaatagcgttcatgaactcgttcgggttattcgcgttaatggaactcatagtaccatctattaaagtatcgcggatactcccgatcgtgctgtcgagaatgcgtgatgctggactggttgcgaatacaacactaaacaagttgcttcgctgaaagtctctatttgccattcctgacaaaaattcatctacgctatagaacattgttcccccttaatactgcgtatcaaaaatcgaatcctgacgcatatcgatcagttccataaactgaatttcgatttcaactgcgatcggggtgttcggtgattctctcaacgtatttacaatgttgtccattgtacgcccgaaacgaacgctggtaatacctgctggcccgaacgtggaatgagggaaccgcaaactgtcgcctgtctggaagtcacgaataaaccacacaggaggcgatttaataacttcaacgttcgatacgaagtcaacaatctgatccccgatgctgccgttgaaatcgcttgctgtcgtctggtttgttgatggtgcaaaaacgtttgcaaccttcgaagcgctggaattatacgcttgtttaaccagtccggctaattctgctggagtaccgcccgaagtagtaccataacccagcaccgtgaacaggtaatagattttaatcagttccagcaggtcataacggctttcgataacgaatgtattgtaatacatctttgtgcgcttatcagagccttgaaacgctgctttagtaccgatgtcgattgcttccctacggtctgccagaataccaccagaaacggattctacagcgccccagataacgtttgataccgcacgggataaacctttagcaacaatactatcggttgcatcctgataacggtgtgagttcacttcgttatcgttcaggcttcgcggtaaaagtatttgacaaatggggttaagtgtacccatagtacgggtattcaaaacctgtttgtatcgaacgttcccagtgttagcactaaggatctgttgcgcgttctgtgctgcctgacgtaatgagcggtagttgtctttactgcctggtgcaagtccacccgtgaaatcatatgctgtgaacagcaagccgttattatacaggcttgatgcattataagcgttatcaatacctgctgcacgttgggaaggaaattccgctgttacgatcggttgagtcaacgcgtttttagttgttgcagcacccccagaggggatgccagcatttttgatttcagcaaatgattgtacagtgtcttgcaatactgtaattttcatttaaatttcctttaagctaatgcaatcaatggtttacggtcagttcgttgtactgaatgctgaaccgtgttgtttactgttttgttgttgacctgaacgctgttaggcgttgtaggctgaacaggtgatttcacaggttccggttgcttgtcaatacttgcactgctttccggtactgcggcgatcttgttctgccactggtcaagcattgagcggaatcgttcgctatcgtcttcgtcaagtttcttggagttgtttttctcttcgagtgattcaagaattttctccattgctttcttgtcttcgttggtgatattttctttatcaagaatctgatcaccacgatcgaaatcattttccgctttcggcttctcagccttttgtgctgcttcgatctgtttggtttcgtccacgcgcttacggttagcggtattctctttatcaacctcagcttttaacagtgcggggttttcctgcaatgctttcagttctttcttcttctcttcggtgatcttttcttcgatagccacacgatcgcgcatctgttccaattgcttagacaatgctttctgtgcgtctgtttgttgtccgaaactatatgagaatgcgccctgggtagccttaacctgttcgacaaccttagaacgtgcctcaaccactttatcattctgatcctggatctcctgctgtttcagcagaatcagatcatcgggatcaatttcaagaccgtatttttgtttgtcgcgcagtgctgatactttcattccgcgtccggcgttggtaatcgtttcagatccggtatattcacccagagcgtaaatcagattaccgataccttccgtgattgcggttttgatggtatcgcccagaaccttaaacggttcaaggaacaagtttttcagcgattcgcccaaattactcatatcgaagttttgcagaccttcgttgattttctcagcaagggttttgatattcccgaagtatgaaccaaacaaatctttcgaggcttcaccctctgcaagaatatcctggaaccacttctgaacaaccttactcagtacgtcgatcgcaaatacgatactaccgataatcagagtccattttgcaaacttcgccagcgcttcgagagaataaccgataaagcgagccagaagaccggatgtattatccttgattgcacccagcaaagacaatactttcttgctgaatttcttctcgtctttatccttatcgcggatcttcttcttgtcccgatcgacctccggttcctcttccggtactggttcaggttccggcgcgggggctggtttcttttcagcgagttcgataaacttggtgattgcttctgcaatcgttccggtgtatgtttcgattttcgcaaatgggttatgctggttcgatacactgacggagttatcaacactggttgtgctgttgtctgttaatgatggtggacgcgctggcccaacaaaatcgggcaactgttcagcaagtggttgctgatcctgttcgtattgttcctggaagccagcgaatttctctttgaaacgatcctcaaaggatttcacactgtctttgatgtccagtgtattcagcgcggtttcaagggtgttatcattgatatcctttaactcacgcattgaatctttatctaacgttgcctggatcttacgaacagtcggttgcgcctgtggttttggtggattctgcatccggcgacgttgttcttcgttaaaatatggattgctagccattatcattcaccgatgatgttaagccctttaatggttttcccctcatgcacaatatagacttcctggagtacgccacgttttacatcgtcatattcataacgatacaggcagttaattaattgaatacggttttcgtccgtcagttcgatcggcttcccgttgtcatacgcttctttaagcagtaatgccagatcatccagcattagggtcggtttgttgaagaccaatcgaaggttatcaaaagtatgttcatacttagcttcgctgattttcatatcatccagattaataccgatctctttcagtatcgccattgccttatcgtcattatgataatgcaggtgaatcaaaaggaattcggtttctgctgcggttaattcgcgcggttgaatctctttgatgatatactcaagcaactgcattgggtctttcattgctttaatctgggtgaaatgacgataacccagacgggggatcgtaacctgttcaccagtaggcaacgtgactactttatttttgctgttcttgatgtttaaacgcgtaaccataaatttatcaagtgtgtttttcttctctttcatgatcgcctcaagtatcccgatatttactatttagtaaatagaatataaagggaggatgtctaatgtccagtaaagttataaaccgcgtcgtgtcggttaaattatatccaacatatgaaaagttcgctgataacgtctatcttgaattgttacctgcccttgtctcaatgagtgagaaaaccatcattaacggtacttctgaaacattgatgcagatctatgataaccagttaatctatcagttgacagaaaaaccgattattcaggtatccttccagtataacgaaacgttagaacagcattactacggtgttctgtattcaaacgtcgaaaccgatgatatgaaccgctctatactgcgcctaaacctttctccggtgcatacggtgtttcgtcgtaagttttcccgttcgttcagtaacaacgccgtacagacgattacagagtgcatgacggcactgtataacgatatgaagttgatcacgccgcatatcgacgcatcaaacgtgcgtattcctccggcttgcctgagcgggacgtatgaaaccgtgtttgattacatccgtgacaacgggcagagcgtagattcgtctgacttctgttatctgtgggaagatggttccggtatctttatgaaaagcaatacggagatcctcgcacaaaccccgttaaaggcttacaagttcaacgtaagtaacccgtttttaggtgacgctttggtattcacgaaaggtgaatacattacccataaggataacactaccctgttaggggatgcaagtttctttagtttctcgatgacggataaaaaactgtatagtgatatccttgcgagtaccgatattgaaaacgcatggatcaccatgaacagaaacgcggtatatgagaacaacttccagaacccagacaaacagggtcaaccgttccaggctgtgaagtgtcagacgttatccagctatgaaaaacgtattcggtttgatatcaatcagggtcgaatggatgttaaagtgggggcattgattgaggtgttaggggatgaatattcagggaagtatctgatcgttgaatgtatccgcgatgtatcaaaagatttccacctgcaaacattggaatgtgtacaggtggcagcggctacgaatgacaccagcaaaaccagtgaggcttaggccgtagtttcttcatgatagcccatgaacaggtcgaacacgttgttcttgttctgtttacgggctttcttgatattctcgtagttctcgcgaggcatatcgatcatgaagcacttctgacgcgctgtagcgttctctgtgagcgcgaacagttcatcttcggtgtaatccttgtttttgtccagatcgagaatgacgcattgccaggtgtcttcatcactggtttgctgcatcatcaccagcgcggcgtttttgaaccccagattatgagcaagcatttcatgaacgaattcgcgatcgtcgtcttcataacggatttcttgcccttcccaacggatcaggcggatagttttacttggttctgatttcataatttattcctgctcatgatttcacgcaaacgcttcgtcggttctggtggattcttaatgatttcctgaatctgattccagacttcttccgaaacttctttcctttccatgataacattattcgggttatcacagcattttccaaccataacacaacgcccacaattaaggcagattgtgtccggtatcgttggagcattatcaaggaagcgaccgaaatcaatatctttcagcgcttccgcaacccgtgcttcaacggcttctttactcatatcaaccatttttcgcctcgttcatccaatcgcggaatttccacaatttgttctgtgctgcgatgtagctttcttcacggaaattagaagcgcaatagatcagagtcgggaactgaacttcgttattgcttggcttctcgtcaaacacatacacctgaatgttgttgcgagttaaacgcggtgcgttcatgccagcaatcagagccagaaaatccgctttcttagttaagtgagccattgacataatcttttcctctttccgtgttgtttcgatgtgggtaatgtatcactacactacccaggaagcaagcattattttcatttttcttctttgaagcaaagttctacttcaacgttgactaaacagattgcgatatcccatgaatctgcaactgggtcatatactgctttgtcttcgtctgcaacaggcagagcaacaacccaaccatcaacaacacgtttaacccgaagtctttcgaataatgctaccgcttcgcccaaagactcaccaccattcgccagcttttcaaaacgcgcacggtctgccaggttgattactttgccttcgagttctttagtgatttgcatgggatgttccttttgtctgtttcgtttcgatgtgtgtaatatacaaaaagcccctcacatatgcaaggggcttctttagcaaaaagtgctatttaaaacagatcagcgaagataacgtgaatgtcatccggttcggtcttatcgcgtcgaatcttcttgatgattggcaggaagaaactgaactcaggttcgcccttcttacgcgttttcgatttctggagtccgtcaacttccatttcgacgatagcgccgatatagtcatctttgttcgccataatgtattcgcgatccagttcaccacgttcttctaacgggatgtacacgcggttaataccgtcttcatcgtatcggtagtccgtatcagtcagaccggaacctgtgttcgttctggcttctcctgataagtcctcaaccacaaacccgccaaccttatgaggttctttggtgtgttcgtacacgtcgatgattcgcagttcgatcggggttttgttcttcaacttcacctgatccgcaacgcgtgaatccttccatttgaaatcaacgtttttcaggattgaaccctctttaccgtcattgcggtaattgttgtaatcctttttcgcttccgcatagttctgcaccaggatagaagggatcagcttgaccgatgttacaccagagccagccagcgcaccttccaggatagagaaacgatcgcaatatggttgaacactcggagcatcgccatagtatacttcatacggtacgatatcccagacaacataaacgatattgcgctgttcttcgtcgctgatagtacctttcagggatttgtttacaatcccgttgccctcttcgcgtttcgcttccgcttgtgtctcgttctcggtagcttcccgcctaacatctgccacaaggtcagaaacagaatcgtcgtcatcgcccataaacccagcaagactaaatggaacgctgtttgaaggaacgacagcagttttttcagcagggacataaatcagttctccatcaagtacaacatcataacccagatattcacgaatctttttcagatccttgtccagattcaccaaaccttcatactcatttcccgcgcgggttgctttgcggatctgattctctaacagatcggacatacaacgcgcaccatcggctttaagctgcgagtaagcagggaagcgaatacgttttaaggctttctcgctaaacggcgtagcgaggcactgaggctgttctggaatgagtttcttccatacgcggttcggtaacgttgtacccgcaccacattccagatcgcggttaatgatacggcgaagaacttcgcgatcattctcgttcactgatgatacgatatccagcaaacgatcacgggctgcgttgcccgtatattttcgcgttgccaaatcagacatcaaatccgcgatagcattcgatagcggggttgtgcctggcttaccgtccacctgcgggaacttcttaatgtgaaacataatctgtttcgtgtacgtaatgcggaaaatctcttttagcagatcattacctgcattacgtttcaggatcgcttccttctctgaaattttcagagtcgaagcgagttcatttagaatctgtaagatcatttaagtacctttcattatgtgtaaaggaaacgagtgctttggccttatatgcttcacttgcttcctcggcagaatcataaaatcctaaccacttagtcactccatgtaaagtgattttggcgctatatttttgcgatttcttgttgaatgacacgcccttaaacccaacggtattatttttattccgtgtgcggttttgttgatttgttacctgattggactcccttagattagaaatcatatcaccgcattcaacaccgtgaacatggtcaaccatcactggaagataaccattaacgtaataaaatatcacccgtgaccggatgtacatcgcattttcgaattttattcgcgtatatccacttgatttatgaaaagaacctgcttcacttccagcaggaattttattacttctcttttccaaccagaaacattttccggtttctggttctactcgaatacattgtagtaggttttctataccttgcgtttcttcatcaagagttctcaattgctttttcaatttcatgccagttattcactttagtatgaggtacactcggttcactacgttcgccacgcaacatatggaataacggcaactgactgatgacgttatgacactcattcaagtttactgcaaggtcatcaatgaaacatactaaacgatcgccatattttgctttggcttccaggtaacgatgtactttcgtttcgccgtgaccgacaacacaaacctctttgaatgcagaagggaacagcgtgttcaggtttgcaatacggttaaggcttgccgtaggagtggttcccagcgccgtgacagccacgaaatcatatttgactttcagacggttgatcacaattaacgcatcgtcatacgcgcttagatagcgaataaacgaactgttgttgtattcttccatgagaattttcgccagttggtgatcacacccaaagatttcagtcatatcacggaacttttcatccgtaaccatatccagcgcgatatcggtcggcatgttgtgtttagacaaaaagaacgggaggccgctttgccattttacggcgatcccgtcaatgtcggtaagaataactggtttcaagatataacctcataacggtcgaagaaaagggaacttttaaacgcttgtatatcagcgaggaattgatcacgctcgaatgtacgatagtaatcaaattcgatgcacaacatatcatcgtttgttacaccaatgccaacgacatcttgatgatatttctttgcctgttgcagaacgaaaggatcgagatccgaacagtcgaaataaattacgtaactcattatcaacccttgtacatataaacagcgtcgaagcctggaacatccatttcgactttatcgaacacaatatctttcagcttacatttttcaacgtagctgttgatcacgttcatgttgtttgcgccgatggtaacgtaatacacacccgctttgtagataacacccataatcagggtagaactcaaagcgccctgtgcgtggagtaatgccaacgggttaatcgcgcctttgaacaggaacgcgcattctactctttcatcataatctttcataatatctctcagtcaaaaaatagtgcgaatacgaaccacaccccgaagaaaggccagaatagcacaatcaacggaaaaatggtatgttttaaaatccgtgttgctggtgtgtgataaccgttatgactaacaccaaaacaccaggaaaaccttgcagcacagaataaaccaacagcaaggtataacaggataccgaccacaatcaagaaaatcataacagatcccttaatctggttaagttgcgtacaaactcacgttcagtgagtaccgtttcattcatcttattctttcccattgaatgagtcaaggtactttttccggttgcagccagcgcacggcggaaaccgtcattcaggaaaagagcattgtacgcgttttcaatcaggatttgatacgcttctgattcacggtgaatcggcatacccttccagtatagggtatgatcgcgataccatttctttttcttgcctttgaacttggcggctttaccaaccagcgtacacacatgcgcttgcatatctggattgctgaatttcagactttgtaaaaagccctccattgatgcacattctaccccgtcaaacgtaaacggatgcggggcgaagttgctcaatgcgcatgatgggtatgaatcaccactaccaatattcataataactctcttaacgtatggtctacatagaaattcattgattacatcaatctcttcggagattgttctttctgttttccccgtataccttcatacaccgactcgattaaaagatctttttcgaatgaccgtaacattatgaacaccacccgccccgcaagtgctggttttcagagtttcggctttacgcgcacccagaaccagagttttaacaggagtcacaggagcagcgataaccacaacagcagcccaacgtgcgccaacagctttatcagtacccaggtcgattacagcagaggtatttttaccagcagccagaacatacgcacgggcttcacgacgagtgttgaagcaaaccagttctttcatgttgtaagttttcataatgtcatcctcaaagttaagttgtcttgcctacgtggttaaagatacaagaaagcctgattcagtgcaagcattattttgcataaaaacgaaaaaagccgctacctttcggcaacggcttgatttttaatacttttcgtcaggctggaacaccgcacgacacgcccacatagaggcttctttcagtcggtctttcgccagttggatttgatggacacgttcaagcatcgcatcgagttcttctgtggtgaatgaatcggtatctgataccgcgtaatcgcttgaatactcttcatccagttctttgaagatttcgcccagggcaatttcagcggccttgatgcggtttactttgtcgatcttttctttcgagtggggcttatagccctgtacgtcttcaatcgccattatatactctctgtaaaggttcgggcgataacgtcgcgctgttgttcaggagtcagtgaattgaaacgcactgcatagccggacacacggatcgttaactgcgggtatttttctggatgcttcacagcgtcttccagagtttcacggcgcaacacgtttacgtttaagtgttgtccaccttccactttaacagtgggttgaaattcaatatcgacttcacgttttgcgaatggagcaacgcgagctttaccgatcactgaatccatttcgagggttttggataccaacacacgaacatcattaccttcttccaggtagattgtaccagtgtgtaaaccttctaaaatctgatatgctttcattgtattacctttctacgacataataacgtaacgggttgatatggaacgccagcattgcacgatccagcccgttagggtcagttacttcctgtttcagtttccacccgcaatacacgcgtaagcagaactgaacctttccgactttaagccacggtttgaagacataaagcccccatgccgaatcattccacatcaacagataaccgtgacgtgatggatcggaaccaccttctgttttcgggttgcccttccaggcgaagtctgattgtgcttcacgccctaagacgtgataagcgaagttgtacgccttgttacgccacaaccagcctacacgttgcgcatacacacccagatcgcctaagtgataccggatgttagcccaacgccggatatgtccaccatcaccatcgatcgggttatcgaatgtttccatccaacggaaccctttaggtaagtgtccggtttcttcactgtagaacggaaccacaaaaggagccagcagaatagccagaacacccgaaagaatatccaggggaaccagtacaagccagcttgcgtatttcaaaaagcgcatatgcttctccagaaaaaaggctatccgaagatagcctgttgattaacgaactgcgttgatatacttatacgcttctgcgaattcttcttccagagcttcatttgtgaacggaatatcgttcgatttgaagccaccgctgataagatactggataataaacacagcagtatcaatagaaatcaactggtgatttgttggttcgatgtcagtacggcgaaccacgtttacgatcgaccagtcaaagaatatacaatgacattctttcttgctgttcgcctgtggtgatgcaaagaacccattcacagaatacgcttccagtgcattacggaacatattttcgaaatcatcaatttctttggtaaacattttcatcaatttaccgttgatttctttttcagttggcgtagcaacgatttcgcgaatctgtggggttaattcaaacagcttttgaagacctttcatatttttctcttttaaatttcatacgcggagtcgatgcaagattgttcaagattaccaggtgaatcttcaatcagtggttctgttttaccacaaacatctgatgcatacggatcatcatcaacataacattcattgaattttaattttctgcggtaatcatctttatgtaactgcattttccattctctgaatgtcatcccatatctttctcgaaattgaactggcgtcatattcttgaagatattgattgtttttcctgttgatggatcgtatttggtattttcacgaaattgcatatagacctcattaaatttatgggctggaagtttctttacttcaccccgcattccggggaacctattaccggataccaacagagcctatcgcatacgataaggttgcatattccgaaccatttaacggcattgcgctacgcacccgaattggagcaggtgaagggactcgaaccctcaacaatctggatggaaaccagatattctaccaattgaactacacctgcgaattttttagaactgcttgcgataaatttcgcgaaccagcgggtcaacatctttcgcgtatttacatacgtcttcgaactggacgatgtacgccatgacttcatcggcacgggatttcagtttaccctgatgcgcgtcaatgatcattgctgccattacgtcaatacgcgcgggggcttccagaatttcgcctttgtcgaacagttttttggacttgctgacagtatcagcgataattgcttgaattgatttagccattttagatctcgtagattgcctggattgctttgtaatgtgcggaaacgtattttgtttccttctcttttgcttctttttcggaaatgtaacccgcaaccagatcagggtcaggaacattcgccatgtgagcgcttggcagtgggatatatttacccatgattcgttctgccgcttctgctggaacgtctacgcctacagaaacaactttaccataaaaaggttgttccccgtgctggcgtacaccaaccacgataccagattcagatttgatttcggaaccctgcggacgcgcagtagcttcgatgatcacatattcgccggatgcttttactttcagttcagacatttctttactcattgttgttaaacactactttggaaaagtcgataaacgattctaactcttcccgtttaatttgttccacgacacagccatatttttgcaagcgtgaaatccattcatcattaccacgatcgtatttatcgagataatacaccgatgtaatcgccccgctagcaacataccattcgatatgtttcgcgcagttagggcaaggcgatgtagttgtgtaaagtgctgcgtctttgagtataacacctcttgtgtgcgcactcaatagcgctttcatttctgcatgaatttcgttatcgtttgaccatgctgaatgttcaggacgatcaaccgctttcagtttaccgtcatcattcaccatatgattgttgcatgagttgcaacgacaatcaaggtcaaccgtattattttcgccccacgcgacgacacgaccaccaatcgcgataatagcacctacacgattcgaaatacattgagaacgttgactccgatcgattgctctcaacatattcattactttgaatttcattaacggtcatccatatatttcagaatgtctttgatgaaatcgttatcagggttgacgatgtgatacgtagtacctgaacgtgtcaccacttcaacaaacgatttgttcgccggaatcgcgtattcaacaaccggacttgttgcaatgtcctgttgaggatcgttatcaaccaacccaaacacacaaccataacgaagcatcgttggttcagtacagaaccatgcctgatggatctttctgattttgtcactcataatactgccgcccatgttacgaatttagttaccggattccactgaatcccgaactgctgttcaacgatgttacgttgactcagaatacccagaaggaaggagaactgaccatcgcggacaatcttcactgtataaccagcaggaattttatcagcaatgcgctggcctaactggttgagtttcagttgtagttcaacaggattctcaactttaacacgatcacccagttcaaccatcacattttcattttcacgaataaccataatattctcctttgtttgtgcgggtatcttatcacacccgcacccactgtcaactgttttttagaagtcgccgtaatcaacctggaaacacgggataccgttcattcgccacatcccgactggtgtatccctgtcgtccactgcaagaacaggataatacttatcgagaatcttttcaacaagtatttgctcttttacgtggaaatcgtgacgatgatcaccttcttctcgcatgtagataccatcgctcaggtcaacatcgtatccgatcaggcttgcagcggtatcatgtgcgcactgtgcagtaccctcacgcccagacacaacaacacaggcataaccagcggccttatacatcctgaacagttcttgaacaggagggttaggcggatcgttgatcacctttgtgaagtcatacgggctgcgttgtccaactttggtcagtgtcccgtcaacgtcgaagataacacatttcggcttgctcggatctgcatagctcatagccggaacccagccacggagtttacggtactgttcgaacatcgcccagacacgggaaacaggtagagcattcacaccgcgtttatggttgcgtttcaggagttctacgatatcggcatcaatccattcgatatggaaatcagcattgaactctttcgcgatctctcgccacacatcatgatctttttggtgtaaatgggtattgtgaacgataacgttcttcccactcgccagggcattacgaactgtatcttcttgcacacggcaaacaaacagttctttctcttcggtgaagcgatagccagtgagatcaccgccagcacagtaaagggttttgcggatatcgtcacgggaaacagtcagcgtgttccccagttgacgtgctttttctttcgcccatgtagttttcccgctacctggtacacctacagtaataaacagattcattacacaatctcatattcaatcagttctttgttatgctcattcgttagattgagccacatatcacggttccagtcattttcgatccagagaccttctttgtccttcttcgcatcataaacctttccttcggttatgtcacggaaaaatgacttgattattttgacttgcatttctcagggtatcccacggtacacagaatgttatccgtctggtctttctgacgcttaacgtcattcatccagctacggaagattaacgaatcgggatatgaaagggcaacgtatgggtttccgtcataaggcatgacaaggtattttttaccgtcaatctctcggacttctgcaaccactttccatttcacattaaccggattcaccttagcggggagtgtaggcaaaatcttttctggcggcttctccgcgcacccaaccaacagaacgcccagaacaagggctaacgttgcaattttcatttgtcgtactccgccatatactcttcgaaggacttgttgatcttgatttcgatcagtcctggttttttaaacagcagatctttacgtccggcatccttgaccaactgctgatccttacctttttgttcgacatagatcaccgtattggtgttgtttgtctctttgacttttttgatatcagcctgtaactctttgatatctttagccaattggtcattttcacttttcagtgtgattgtcatgtacaaaagccctgccaaagacagggctacaatgacaggccacaccaaagaagttaactttggaaaggctggtaatgtcatttatattcttccggtataaactgttcgtagttcttcgccattaatgcaacgatgttatcgaccagcttttgcttatcggtatcatcgaaataacgcatcataggcccgaagatgatacgaccgtcaggggttaagtcagcgctcagggcgatcgcgtagtctttgcgtgatttgcctttcgtgtcttcgattgcctggaatgcttttgcagtcagacgattgagactatcaaggaataacgtttcgaatgcgtcaattttcttgagtgcgtacatatcatcgaggaacatttgtttcaggtcatcgacggtattttcaacaatatttaagaacagatctttgttattgttgatgctatccttcgtgcggtgaaggtttacataccagttggttttcgctttcacaaaacctttatcagttttgatcacgtaaccctcgaaaccttctttcgtgtaggcttcggtaatgaacgcatccagatcggtgatttcgattttctcgcgctcaaccaggaacggacgtaatacaccatctgcgaagatatcctgataatcgacatattcgcccgtgtcgttattacggatgttcaggatcaccactgctggttcctgatagccaattacaatacggtttgtcggtgcgacgtattccatgttgactgtgaaaccatcgttaaccagttcggtcaggcgatcgaacaatgcgcggttagtctggatcacgctcatagcgtccatagcctgttcagattgaacggatgctttagacttaacacccagatagccggaatcacagaaggtggagatcagggaaccatcttccttaatcatcacatccactacggtttcaccaatcgtcacaggagaggctttcagtgcttcccatgcctttacctcagcatagttgaaaaacttctccatagggcgactggcgagttttacgggggtatccccatccattacaaacatgatgccgcgacattccagcgcaccaggttttaaccagtcggaatagctcgccatgcgatagttaaagatgcgaacattggtttgcatcacagttttttgatcaatgaagtagaagcattcgctttcgttacacagtttcatcaactggttgaataaggttttctgatttttggttagatttgtcatagtgctgtttgttccattcaggattgatttttcggatcatgtttatttcaaaatcatgatatgtgtcttcatcgtgtgttgtcacgataagatttacacgcttacgttttttgattgccatttccagacgtgcggttttcaaaatgttactggggtttgcttcccgccagtatttcgaattgcggtatgtgtctaaccgcttccacaaatcacgacattttccaacatacactatccgaccgtcgatttcaataaaatacacacaatgccggaattcgccacatttaacaaaactccgatctatccttttgtctgaacccagacgcaaaggaaatattacaccaaacgttacatcgtccattatatatccaacttattcacctttccggtcaacacattgacgcagtgagcaatataatcaccgtgacacggtaagggtttgcaactacagcctaaccgcttcccgtccagttctttcagttcgtcgattgtgatcacgccagttcgaatcaagttttggaaatacgggatgaagttaagaatgttttcaccccgtgttcccttgtaaaagggattgccgaacttcgtacctctttgaatatcgacatcccaatcacttttatacttgtttacgacgcgacaatcaagcgtatttttgtcgccattttgcataggcttcgtcgctgatctcagtgttgaggttgccaaccaggtaagaacttacttcaacctcttgcggggctacctgtacgttgtcagacttcaaccatttgttcatccacggatacgggttcggcgttggtttaaatggagactgcaagccaaccgcgcgcatacgctgatccgtcaggtgttcaatataggcgatcgtacttttcagggatacgccgtctacatcaccgatagagaacaggtgttcagcccattctttttcctgttcgtacacttccaggaaaatttgtgtcgcttcctcttcgtactggtaagcgatttccgccatttctgggtcatctttacccatctgccagagtcggatcttgctttgagtgcctttctggtgaagtgcttcatcacgggcaatcagacgcatgatcttcgcgttaccttccatcttgccttgttcggcaaagttgaatgtgaaggtaaacgacacgtagaagcggatcgcttccagagcgttgacagcgtgcatacacaggtacagagcaaccttacatttacgcatttgctctttgcgtttcttctcgtactctgcgatcgattcgtctgggtatccgtgggacgttaacatttcgattttgagcacaatatttttcagttcatgacattctgcgatcagatcatcgtagtattttgtcatggaagcagaacgtttcatgatcgcttcgttgcgcagaattttatcgaactctttcgacgggtcgatgtgtaaattgcgctgaatgtgtgtatagctgcggctatgaattgtttcactgaacgcccatgtttcgatccacgtttccattgagacatcggaagcgatagggaggaacgccaggttcgggccgcgcccctgaatggtatccagcagggtttgatattgcaggtttgaatcgaaaatgattttttcgtgttccggcattttcgcgtactgcatacggtcgatagacagatccacttcttccggtcgccagaagaatgacagttgtttttcagtcagggtttcgaatacacggtgtttctgttcttcgtatcgtgctacgcccgtatcctcaccaaagaacataggctgttctaagtgtttgtgatctgggtttgtgttcattacagttaacatggatttaccttataaaaagcccccgaaggggcattgaatcaaattttgcaaccttcgcaatcttccgcttcttcctcacctgcaccgtcgcgggtgttgtggtagtacagcgttttgatgccgaaatagtttgcatacagcagatcttcaaggatgatttcagatttcactttaccatctgggaagttagccggatcatagtttgtgtttgcagagatagcctgatcaacaaacttctgcataaccgctacatgagacagataacctttgtttccacgttttgccattgtccagagataatcatagaagtcaatctgattattctggtttggtactacctgattgaatgaaccttctttcgaagatttcacactcacagggccgcgtgggggttcaatcccgttggttgagttacttacctgcgagctactttcacaaggcattaaagcagaaagcgttgagttacgcaagccatgttttttgatttcaccgcgtaaccattcccaatcgcagttatacacaggtgatgccagttcatcaacgtttttgcagtaccagtcaataggcaacagcccttgtgcatatttcgtttcgtggaacagtccacatgcaccgcgttcctgtgcgagttccatagaggcaaccagcaggttaaattgaaacgcttccatcaactcatgaacgtttccggcgtatgcttcggagtagtcacaatagttgcttgccagccatgatgcatagttggtgataccgacgcccagagaacggcgctgtttggctttcagagccgctgcaacagggtagttctggtaatccaacaggttatccagtgcgcgtactgcgatgcgtgtaagggctgggaattcgcttatatcggcattatcgagaacgatcgccataagcgtacacagtccaatttcgccagccagtttatcatcgtcatccagtggtgaagttgggatcgcgatttcacagcacaggttcgacatacgaaccggaacagagaaactaccctgctggtttacgtgatgactgttgaaaatgtagttgcgtccggtctgtgcgcgttcctgaacaagcaactggaacagatctaccgctttgatgcgtttcttgcgtaccgttgggtctttttcaagactggtatacagttcttcaaactcagtctgatccgcttgatagaacgcgtcatacaggcgatcgttcgcaacgtcagggctgaacagagtgatgtaatcgttattgattaaacgcttatacatcaaatcgttaagctgtacgccataatccaggtgacgaatacggttttcttcaacgccacggttatttttcagaaccaacaggttttcaacttcaagatgccagatcggataatacagggttgctgcaccaccacgaacaccgccctgggaacaggatttaaccgccgtctgaatgtgtttccagaacgggataacgcctgtatgtactgcttcaccaccacggatttttgaacccatagcgcgaatgtgtccggcgttgacaccaataccagcacgttgagagatatacttcacgatcgcggacgtaacagcgttcagagaacccagagaatcacccgattcgattacaacacaactggagaactgacgcgtaggagtacgcacacccgccataataggcgtaggcaatgacagtttacgatccgaaatcgcgttatagaagtcaaccacatgactgattttatcagcgtgtttttcgtcctgatgcagacacatcgcgatcagcatgaatgcatactgtggtgtttcgtagatgtcgccggacgtgcgatcctgcaacagatatttcccgatcaactgctgaacgccagcatacgaaaattcaaaatctttatcgtgattgattttcgattccagataatcaatctccgctggagtccattttgccaggatttctttatcgtatttcccagcgagaaccatattagcgatgtggtcgtagaacggaatcgggtcaaactgtccgtaaacggttttacgaagggcgaacatttcgaggttagccgctacatactgccagtcaggttcttttgcggagattcgatccgctgcatacttgatcgctacagcctggatctgtttggtagtcataccatcacgaagcaggtcaacgacactttcaaggaatgcgttaacatcaatatttcttccaatactcgcccaattaaggactttgaacagtttttctttttcgaacgtttgacttacgccagaagacttcactactgttttaatatcactcattatcttaccttgttaagaaaggggctttcgccccctttgtttatactgccatagctgcttttagcgagccgtggtgattatagtctttcaaatggatggagtcaaagaattcttgatccaaatcaagtaagctatttaccttcggcattacgagcgtcggaagtggaagcggtgcgcgttccggcttcaacaactctttcgcttgttctactgcgtttttgtagatatggacatcaccgccagtccaaaccagatcgcccacttcatacccgcaaatatcagcgataatatgcgtcaggagagcgtaggaggcgatattgaacggcaaccctaagaagacatcaactgaacgctgataccactgtagagacagtttgccgttgattacgacgaactgaaagaaacagtgacacggacgcaacgccatatcatccagatcaacagggttccaggcagaaacgatgatcccgcgatcgtctggtgtggttttcagttgttcgatgatttttgcaatctgatcgacaccagtgtaaaaaccttcttcaccaaacgagcgccattgatgcccgtagatcggccccagataaccattcgtataacccagcgctttagcctgattttcgtagttatcgtcccagatcgtccgcttatcgctatcttcgccccacgtcattttacgcagtgtttccacgttggtagaaccggacaggaaccattgtaattcatgcttacacggtttgaagaatagctgtttgctggtagtcgctgggaaaccttctgcgaggttccaacgtgcttgcatcccgaagatgcgcagtgtaccaacaccagtacgatcggttgattccgtaccgtgtgttagaacggtgttgacgatatcaagatattgtttcattttatgcctttttcgtatgtcgatcgacgataatttttctgacgcgttcgtttgattcgatctgctgaattttgaaatcagtcagttcatatttcagaaccgcttcacagaattcaggaaccgtgaacgaaacatcacgtttaaaagctggtgcattgaaagtgtgatgtccgtaaatgtgcgtcacaaccacttcgtcaaccagtgtattattgattgcttccagaagcaaccccttaccgccaatgagacacacatcacgatctggatgcgttgctttcatcacgtcgattgcagcagacaacccgccgccgtggatgacataatcagcaatatcgccttttttggttttgaggaaactaccagaaccagacagaacacaatggattcgcccttgcaatttaccaggcagagaagtaaaagtgttcgcacccatgatcaggacgctatctgcggtttctgctttgaagttctgtaaatcctctttgcagtgtccccacggtaaaccctgttcataaccgaaagcatagtccatttcgtacatatcatgaccaacggcgaaaactgcttttactttgctcatagcgcgatccacattttgttgtcttcaatagtcacgatgtagcccatagcttcaaccatgacgcgcaatttgtctttacaggcttcattgtacccgcgaatcttttcaaattcaacagaaaagatactcaatccgttaacatgagcgttaatgattttggattccagatcgaacaccatcacatctaacggactccactcaacagaatgaagtttttcgcgggttaacagggttgtgtgctttggtagtttcattggggtacagtttgccatagccattgttccattttacgtaaatcttcctctaacggagtgaaaccaaaggattcttcgatcacaccgtcttcccatacatcaatttccagaatttccgttaccggagggtttgacatcacatgatcacgacacgcagccatagcggtcataatggaatttgttactgtcagggtatttccctgaaccgatacctgaataatcatactttcacccattctttatctttagtccatgcggttttcaaggtaaaacgctggcggtaatgcatacccaaacttgggggatgcagcgaattgataccttcgacggcgatccgcattgcttcgaacttctcgcgatcaataaactgccctggtagaactggcattctcacacagtcccattcgtaagtatcgctgatctctttactggcattaaccagaatttcagcaatgtcaaaatctgtaggtgcgaaccatcccagattgataaacacgcgtttttgcgtaccttctttcaggttttcaaagtgcgcccatgttggacaactcatagtattttcctcataaaaaaaggaactgcttttcaacagttcccagtataacacagtgatttagtatttcaagcgccaaagagcgattgcttcatcaactgcttttttaatttcttccggcgtgtctttgcgtccggctttaaccagggcagagagcatagaacgaatggttgcattcatctgtgacttctcacgatccatctgtgcctgatgcgccttatcaaccgctggggcttctttcttcgctgcctgtggtttcgtaggctgtgcgcctaactcgtccttagcttgcgtttcagtgcgtttctgttcggcttctttcttcacatgaggtgcggagaatttaccagccttgaagttatcacgcataccttccaggatcttacgggctgtgtaccagtcagcaacaccacgaagttgtttcagggtatcaaccagcaaaccgatacttgcgcctttgctatcctcgtcaatgtcgatatctttcaaccattccacatgtttctgaccggagtgcatgaaatcaaagctgctgaaactccagaaacctttgcggttgctgatctcgcgtttgaagtggaaagtcaaacccgcgccgttatcaaactcaccgtagttactgcggaatgttgcccctgcttgtttcagtgcgttgaaatagtcatctttattgatgcggttaacggtgcgttttggtttctcttccggcgctggtgctgctgcttgctgtgcggtacgtttaacaaaagatgctgaacgatgccccgctgcaaactctgcgttcatccggtcgattaccgctgcgatgccgcttgcgtctggtttcactttctgcatttctttgaaagtgtcgatgatcatatccagacatgcaccgtcttcatcttccagcatagtacctttcagacgttcagcaggtttgaatttgttcacagttgggtcaacaacatactggaacacatacgcgcctttacgcatgaatacgtgacggtagaagtgaactttatattgtccaacatcaacaataacatcgttaccgctaaccttcgcacccaggatacgggcaaaggatgtcatgtagtccgcgcgtttgaacttgagatccttcttagtcgggctaaagatggattccagtttcttagtagggaacaggctttccggcgtgattttgtctgggttcttgccccattggtaatcacggcttgccattttgtgtttcttcgtaccaaccagaaccagagtattaactgatacgctacccagtgcggacgcgtccggcgctgctaaaccttgaccgttaggcggttgacaagagaaagagaagtcaaagaacgcatcaccagaagtgaaacgataggttgcgtgaacagtgtgaccgcgaacttcgctgattgtctgggtataggttgttggttgtccggtgaatttcgtgaaatattccgcaaattcttgcgcgttgaatttagtgctgaaatagtttttcgccagcacgaaatacgctgcaaatttttcttcccacgctttcttgtttgctgcgtgttctgcgcgaacatcactgaaagttttaccagcgctgtttgttttggttacaacgtcatacgcctggttgattttctgcatgagttcagtgctaccaccacggtcggggtgattgcgcagagaagcacgtttaaagagctttgacagttcagctttagattcgtcgccagtagcgcccaaaatcttcaatgcttcgctgtgtgacatttgttcgttaatcattttccgttcctcaaaataaaaacccgtgcaactcagtacacgggcgactttaaggtatttatgttttactgtcaatagattttttcgaggaaccacaccgaagatttattattcttgatgcgggtcaattcaatggggttatctttgaatgcttcctcaacatctgccattgtaactacatgtttttcttccaatagttcattatggagataaaacctctccacttcgggagaggtctttaaatcaaattcacgttctaacatgagatcgccatatctttgattgatggttttgtgaaccgtccaaccttagacatgatgatgtggcggtcgaagtcctgcggatcaagatcctggtgactgattacaataacgttaccatctacagaatccagcagggatttaatcgcgaatgaaccctctttatcaagtggtccatcaaacacttcatcaagtaccagcagagacagatccacgcctgatactttacttgtcacgtcacgccatgtgaacagaatagacaagttgatgcgagcgcgttcgccttgactgaatgacgcataactgaaatcatcgcgccccagtgatttgatcgattcgttgaactcgtcatctaaagtgaactgataatcagcacccaacagatccagataatatgctatctgtttgttgaagtacggaatataacgcttaacgatactcgctttaacgccggaatctttcaacatatccgtaacaataccacgaatatatttttccttgacgtagccttgtcgtttttcgttcagttctgcttcctgctgttgcaactgcttcacgggttcttcatcaatgactacttccgcgcttgcctgttccatgatcgcctgtgcgcgtttagcattggcaacttcgttttgcagagtacctttcagggcttcatatttggttttcagggcattgagtgcgcgttgctgttgcagcaagtcattcatgatcccttgtaactcgtcctgtttggttttgatcagggttaaacgttgtgtacccgctttgatgttctctgcgatctccgccatacgctcaggagtgggtttaatcgcttgcttacaggccggacactcaccgcctttctgatacatcacctccagctttttaaactgttctacagtcattgagagccgcgaataaccgtcacggagtttgttgatatcttccgtccggtcttctccagtgatcaccgattccgcaatctccgcttgcaactgcataagctgtgctttgatgttctttgcggtttctacgtggctatcgtagatctctttgtatcgggcgttgttctggttcgctttcgctcgctgttcgtcaatgaagcgctgatgtgttgcgatctgctgctggatgtgattaccctgcattgagagcgtatccaactgctgattaacaccgcgaatgtatgacttgttcagcttatccatttcactgatgacggacagagacagcaaatcttcaaccagtttccggcgttctggggttttcagttccatgaatggggtgtaacccgctgtacccagaacgataacctgtttgaagcccacaaggttgatgttcagcatagattcaagctgtgcctgataatcacctgctgcggagtcttccggcaacttctcaccgttcttccagatctcgaacaccttcggcttttgtccgcgcaccactttgtacgagtctttcccgtattcgatttccagttcaaccaggcatttctttttgttgacgctgttcaccaactgcccgacttttagatcgcggaatgacttaccgaacagggcataggttaacgcctcgatcagtgtcgatttaccgccaccgtttttccccgtgatcagggttttctttgccgtatcaaattccagttcgatcggggtgttcccgaccgacagaatattttgatacttaatttttttgaagtttagtttcatttaaaatccgttcacataattcagtgatcatttgaacaactgatgaatcaatactatatgatagagtatcgtcgtccagtgtatcaagcatgaatattgaccatgttcgtgatgaatgccatgcacccttcatgatggtcaaacaaactgcgctggtttcccctgcttcgtcggatgtggaaatgatgtgtttcattcccaacatacgcaacaggtgagaatatcggggattcgccccgaaatattcatcataacggctatgcacttgacacctccgcgtatagttcgctgatcagcttattcacttcctctttttcatcgtcggtgatctgcatgttggcgatatactcagtgataagaccacgaacggttttgatttcaaagtcggtatcgacatccgaatctgtttgaactttgtctatgatattaatttcataggcaatttcttcaattttggtttggaactttgcaagcccctgatcaatttcactgacaatcagacgcaccgcgcagttgcggaactgttcgagatcaacatctttctgtgctggatacatgatccggcgatggtgacacacagggttagcgatgaaagtcaattcaggcttgcccgtgaacacatagaatccgcgtgtttcgtcttcgtcgtttgcgctcatagtcagaggcgtaccgatataaaacacgttatcaccctcgttagcgtggtgatagtgtccagagtaaacacgatcgtacttcttcaagaaatcaggttccagcccatgatcggctttgctgttcttgtagaaatagtaaccagacagttcgaagtgtcccaaacaaaagttagctttcgattgtttgatgtagtcaaaaatacgctggctgttttcctgacaaatccacgggatcaggtcaatcgaatttccgccacctaaatcaaccgtggtcggttcgtcgatgacattaaagcattcgtattgacttagtatctcgcgtggcgcgttggggcgtattttgtccttaaattggcaatcgtggttgccgacaagaacatccagagtgatccccgcctcaatcagaagaggaaccagcttttcacgaacaaaattcattgtcgtttgtgtggttgcttttcgaacgtcgaagaagtcgccagcatggaagccgcgcgtgatcccgtgttctttgcaatactctacgatctgtttgaataccgcatacaggttttcttcgttccaggggttatcctggcgaagtccggcatgggtatccccaattaaaacatagttcatataaacctcaaaacccccgaaggggtttatttgccgtatttttcagaagccatgatgaacaggtctttcaactgctggttcgaagtgatccacatcgtttcaatcagttcatcgttgtatggttgcttgagcatatcacgcatctttttgatcgcgtatacgtactgctctttgttaccttcgaagagtgcgttctctgcgtgtttatgcagtcgcttccattccgctttgttcttccgcatgaacttttgcgctttgcgtagggcttcctgttcaatgcgtgtacccttgatggagtccagttcttcttcacgaagatccagcgctgatttttggtgtacttcgtcgattacttcatgctgcacgttcatagtaagtgatctccatgatcattgtttcggcgtttattacatagtccagacgaccttctgttatctggaagtctggatctcgtacatctgtagggtcgatgataatcggaatccctaagctctgcaactctaatttcacaaggtaaggaagcagatcaatttcgtcgttagcatctgctaaaattttgttcaggtcaattttaattttcatagaaacatttccaatgttggcgattcgtccacaacctcgattttatctttgggttttttcgcggactcttcatactgattaagtttgtcatggatatcctgaatgaaagtttcatcggctatcgtggtcatatcagtatcatcgctgtcatagacatgttccaggaagtatttgtatttcttcgcgttctctttcttctcgtagagaatacgagttacaaacgcttgccagcaagccttgttgatgtaaccgtagacgtttgtatatttggtttcgtcaaagttatgaaggccggaaatcgttgccgaaattccatcatcgatcatatccattttccagtcttcggaataacggttgaagttgtatcgacgtgccaaaccgtgagcaatgttcataatcgcaataccgagttcatccggcatcttacgatcaccagtttcacggatttgctgtttccacttacacataactggatacagcttatcattatctgcataaatctttgtagtcattatattctccaaattgaatacattcattatagccgattgaatcaggtgtttcaaacctacttccaatctatattatttaataaaatcagcgcgaagcgcttccgtgagcgaagcgaaacggatag

SEQ ID NO: 41 - DNA, 44166 bp, Unknown
  source: /note="Description of Unknown: KP2M-P0201 Bacteriophage sequence"
caacgcaccatcatccactagcccggcattgagcatatgctcgtgccacttgccggcccaaccagagcggcggtaggcgtcaaccagcggagcaatctctgcatccggcaccggcacagcgcggccgtttacgtcagcactataggcagcatctaggtacttgctcaggcggtcttccagtgcagcccgctcagcgcggaacttgctcctatggaagaagcgctcagagaaacctacacccttatccttcaacgcgcccaggatagcgtcttccactacgctggcgctggcgtccatctccaaagtaaggttgcgtttgaagtccactacggacgggcgacgaccccctacggcggacgcatccgacactagcagcttagccaagtcttcgttgccttgggcgatgttatcgtacagggcaaacatagtggagagcttcttcttagcgccgtccagcatagcttgggcacccttagcctcgttgagggtagtgctgcccgccaggtcctggaaggcttcgctacggaagctctgggcttggtctgcgtagtccttagcagtccacttaacggcgtcctcatacgcatccaggacatcttccaaggcagagcctttggccttgatgcctagggcgttcatgatgtactctcccagttggcggagcatgctcttaccggttggggatttcgtccgcgccagatgcccaacccactcagggctgtcgcctaatcctgccagcatctcgtgcacattacttgcgtaataccgcatacgcggcgtcaaggtggagtctgctgcaataacagcgcgcacttcctccaggcgcttagcaatctcgggattactgtcaactgcacgagcagtagcggcatgaatcagttcgtgcacggctaccttgcttgtgtctgcatccatggcgcgcagtgcgtccccggctgtagtccaggtgctgccattagctcgcttaggtgcgcgtagagatacctccccgcgcctagctaaatcttgttgtgcgtaagtgtagcggctgcggtttgcggagcctgctactagtttaaaatcaatgtcgtttacagcatcacccagcgtgtccagaatagccttttgacctgctgtcaagtgctcagacttcttcaagaactgaactacgtgctgtgctttcatgttcacggaggaggtgttgtttctagctacttggatgctttcatccagtggcttagtgaggatttcctctccctctcctactccggtaacattagcatccctagctgtacgagttgtaggcgcctcggggtcaaacataggctcacgcccagtacgggccttagcagcggctttagcagccttagacatatcccagagctggtccaacccggctacgcctgctaccagtgcagttaccgcagcagattggcccagttggtcctgtgcatagaatgcggagcctacgtcagcagcgcggatagcagtgcgtgcagctaagcccgcacggccagcgataccagcagcagacatcggggccaggatgaacggggaatcccctaccaacatacccgcgaacccggctactgtgttgtcggccattaagcggtcacggtcgcgttgctcaagcatctgctgcatgcgatagttataatcttctatcgacacggaatcgtgcaggtactcaatctcttcctgatttggggcgtacaacttagctcgggtatcgctactcagagtctgcttggcgttaaagttctggtcccggtcaaatgccggggcagcggccttgcggatagctgcagcgataatgctgttgcccatgcccgacgcaaagctctccccggctgtagtagcgggggtcttggcctgcgccagtaaggaggcacgctccagtgcatttaagccgttgtccccagcatcgttccaatctacgcgctcaggcgcaggtttaagtgttgcgcccttagcagaatccttttcctgtggattcggttcttggttcagaaactgagccataatatctcctaaaagaattttgataaggggaggccccgaagggcctctggttagtgcgttgcttcaaatagccaatcacgcaggttttgttccaggtacttcttacgctcaggttgggcctgcttgtacgcctgggtattccgcagcgcttgccaagccctaccctgggcctcagatacaggatactgatacgcccccaccggggacttagcagccttgcgtacctgtgccatcgcctccgctacagggccagagctaccgttaccgccgtgatagttcaggtccaccataacctttaacgcctcgtcggaggaattcaaaccctgccccttgagctgcttctgcacgttcggaacgtactgcttctccagggaggacttgaggatactgataccgtcatcaatggttactttctgcgggaccggcatgcctgagttgacgtgcagaccaaagcctacacttcccttgcccttgccttctcggaacccttcgaacttcatagtggtggcgaggatgtcactaaacagcgacggttccagcccaaccgagttacggccattgacctgtacgctgacagcacgtccgttatcatggtcgtagaaggtggcaggacgtacacctacttgctcactgccaatcttcatctctccagccagcgccgaatcatacgcagactgcgcagtagcctgaacgtctcgaaggttcacagacatagtctggaatgtgcccttcttgtcgaacacggttacggtcatgttctgacctgcgttgcccgcggtggcggcttgcactactacacgttccatgttgctggggtcagtaatagcctggacttggttttgaatctgctgctgcagtgtagccttaaactgctcctggtctcccttgtagtcacccatgatagactgcagagaggtccctgcaggcagatacacgtgcctcggtgtaccggcaatctccagctccagcttacgggcttggatgttacctttgagcatcgtgttgatgtcgtcggcatccttacccactagagattctgggttgcggctgtacgtgtaacggtactcctcctccatggcagcgcgcgcttcctggcgctgggcgtcggcatcaccaaagaaactgaaccagttgctggtaccactagggtccaccatcttgtccgtggggttgctctggatattgctgtagcgcccgctggccttgttacgcgcctggcggcgcaggtcatccaagatagtgtcgctggcgttactcgggttctgtgcaatagctttctgcactaccccctgccactcagacgggacctcagacagcagcgccatcttacctaagtccgtgctggtgctataagcctgtgcccacaagttgatgctgctgacgttctcacgggaaacttcaccgtcctcgccgagctggtccagagtagccaaggtgcgggccatgtccgaagacatacgcttgtgtgcctcgttggtggcccacgcatccttgctgttgcttccgtatgccagtagctgtaggttcccttccggcgtgtccggaaagctcttgagcagctcattgcgcgccttacccaggtcgccctcgtacatccctgccagggtagagcttggcatattcccagtaatcgctgtgtgcaatgcctgggtgtctgccgctttctcgcgaatagtctgagccttgttccagaactccatgctggtgccagcgctgagtacatcagatgccgacagctcgatgatgcgactacgaatacgcgacatagtctgctcctgctgctcaggagtctgcccctctaatgaagagattgcgtcggagatttcaaaacgagcctgggtctctatctgagcaccggcgcgcttgaattcctgatacagcgccgcattgacgtccacagagttgactccgagttccttggtggctagctcttgcagctggttgattaccagagggtcctgggtctgctgcgctacgctgaccaggtactgcttagcccggtctagcttcttgctcttgtccaggtgctccgcagccaggatactgtctaagcccgtcttaatggacatctgcgcagcggcaccctgtcccgcctgcaggcgctgatagaactcatcactggacgagctaaggccacggtcgagtgcacggtcagcctgcgccatggcaaatgcagctctacctttctggaaggctgtatagttcgccatgctggtagcacggagctgctgcagtatattcgtggcagactgtttggacatgtccgggagatacatcccgagcttgtctgccattgactgtacgtgctcttgctcctgctgctggaattcctcgtcagtcagaccagactcagcagctttcttagctcgtgcgatgctatctgtgcgccacttggctagagagtcgtacgcggcggcggatacgtagccatcctgataggcctcgcgtacgaagatgttctgcttctgtacagcctcatctttggaagccattgcatctactgcgccctgggcatccattgcgccgcgcaccgttgcggctgcagcgttttcttttactgcttcgtcaaaccctacgccgaagtcctgcacgaaccctgacagggcagctaggcgttttgctttggaggtatcaacagacacctcacttaccgttgacggtaagctaacatcgttggactgcagttgcactcctccgatacttaacccctgtctactgggttgaatcacaggcatttgacattcctcttaagttaccaggtatgaactgagctgttacctttgcccccccataaatcataggaggacgccatgttctgagtagctgctgcaccacttccgggtgttgagctaccagagtcagtagacgacgcagcgttaccagcgtactgcccaacggcagatgccccgacactcaacaacgagttaaacatgttatcgtaggggtcctccatgtccatgttagccaggccgctgtccacggccttgtccgtcattagacggaaaccctcttcctgggttgcctgctggtcacgcacgctggcctcttgccgcccggctacagtgttcaccgtggctacggcgtctttaacagaggcccccatagtgccggaagctgctgcctgcagtcctacttggctctgtgcctgcagcttctgctgctgtatgttaaacagggaaacctcagtccggtccctggactgggcgcgctgtagcgctatatcgtttaactgtttggctgtctgctgaatcacagccttgtttcttgccttggacacctcgacctgagcaccatgccccagaacggtcttagcggccatggccgcaaccatccaccacatattaaattctccgtctgcgttggttgtagcgcaggatgtacgagatatccagcacattcagttccatagaaccctcagtaaataaagacacctcggttgtgtctgcgttagtacggcatggcacggtaatcgtagccaagtccataagcagcgcctgcccaatggtcagctccttggagttcattaggattccggttagttccccgtcccagcttacatcgcgcggcgtatctagaacttgcacgtcgaagtgcccagagttacgcacagcaacatccaggcgcagtagacgcacgtgcccgctacccactagcttatcattctggtcgcgcagaataggcgtagtgagggtgaacgtgctcttatagcgtctaccgagtacgtaggtgccgtctggtacacctcggacgacgctcaaggtgttctccccagcaacccccttgatgcctacctcagtaggccccattgcatcactggatacgtatgtaatgataaggtcatccttgtaactatcagcccaaccggtcggtcgcagcactgccggaacctcgaacaccccgtcctgtacctgaacttgcttctgcaaatccgagtatgcctcacgatattctgagcccagctgataaccttcacgcgggtccatagacacaatcagaagcttgttgctgggactgggtccttgcatgtacaagaacacctcatcctccagtgcctgcacgctcaggattggatacgggaacgaccacttatgccacgccgcctgcatcttagcgccgtcacttccgccccacatgaactcgtagaccagcaggctattacgctctccagacatgcgcgagaaggccatattggtgacactggagttttgcatctgcaataccctgcctgggatatacctaggtaagtgcacagtggcatcctgtgtagtgtactgcgacgaagtatacggcgatgggattaactccagaatacctgcgtagctgtcgttgcgcttgttcgggtagattactgtctgccccgccattaccggagtaacacggctatcacactcataggtgctggtgatgcttatgcttgcgttggtaggcgtaagcaccacagatccgggtacaacggcctgcatgctgttagcaaacaggaccaggtcccggttaaactgcacagcggtgcggtacacagaatcctgggcagatgcagagctaatgctgatacggtccgtatccagcagagacgtcacagtagagcggtagaagcgctgatacaggcccgaggctgacatatccacagagctgccgctaagcagaaccaggcgaccctggaaagctgcgatgcccgtgatataaccattctcgacgaaacctggattactgttattatcgtcgttgcccgctaagcgcccctcccaatcccgtgcaatgatgttgtcatccgcggcgagctctctgggcatgttcgtaatcttggtgatgctgccgtacgcccccacctcagaccaggtgcgggtactgtaatcgaactgataccacgcagtctcagacgaggccgtgcccactctgcacattgccccgtcggcttgcgctgggagctgtgcaggcaggtcctgctcctggtctacacgggactggttggacaccacagcgtaagtatcacccgcgtcagaggataccacgcagttactcaacccatataagaacaagtacgctccgcgtacgctcacgttcccggagggcagcccgttcgctacaagagagtcccgcagctgctgggcaacgtaggcacctgatacctcctcagcattgccgctggtgctaccggcagccggtgcggtgtagtccccagtgtagtccaccccagcagaggtaacggtgacgttccagcgtttctggaatgctgcagacttaacgtagaagaacccagttgtgctggggtcgatacgcccggtgttgtccacggttgtgttcggggccatctccgtgttcaggatataagtcagaccagcaatgcttgcagtctgcaaagaggtctgacctacggtggtaacaaagtacgggtcattgccggaattaaggatggtctttccattcttagccagcaaccaccagttaccgttgctggtgttaatcagcaggtgcctaccgtcagtgccgcgctctacgtattcagtgaacagggaatcaagccccgggttatcaatagtactctcccagacaatctcacccgggggcctgcggcggataccggaaaccgggtcgctgagcatgttcagctgcgcccccagttgccctggttggcgctctctcggaacctgctgggaaacaccctgcagcaagctctgaatagtaccttctaatgattgcgccataacctctccttaaaccataaaacgagcgcggcggattctgcgtgcaaaacgggtcttgctggtgctgaacttctgattgcgcagatgctcgcgcagcaccatgctcttgtaacgttcagcttcctgtgcgtaattggcgtagttgctgtcgccgcccaggtcgttgagatacacctgtgcagtggtgtagttagctacccacatagctgcgtgctccggtaggtcctcaaagtccaagtcaaggactatcttgagcttaacggggctgtcgaagtattggttctgccccatcaggtcgtacagattcccatcgcgtactccgtacttggagtcggagcaggcatcatacacagctaactggttccacggcactttaataaagccgtccgcagtgggtgtaacttcacgctcgaccacgttaaaccagaaccctgtgctgagcagcccacgacgattgcgcgcaagcgcagagcgagctaatcctgcactggggttgctggtgttgatgtccataacgcgagactccccaagggcttccagcgtcaggttcacagcatctaattctctcatatttgttcctctattaaagacccctaggacccttaagacagggacaaaaaaaaagcccctggcacccgaaggcaccaggggcgcgtattactcttccgcagtatcagcggctgcatcagccgccttacgggttttcttggtagccttgcggccagactcgaccgaggccacctggatgttcttcgctacatcggtggcggccttaaccgcctcccgctgagctgcattggcctggagagtctccagaccgaacgtagcgattactgccattgaacctccaattaggacttggtggtgaaggtgaacttagtcactgcagcggtgtccggacgacgcaggccgatgttgtacatcgcgtagcagtccagtacgttgctgaactcgcgcgtatcgtcccagatacgggaggtgaacggcttagcttcaacagtcaccagggtcttggacttgctgaaagtcaccatacggcacagcgcgtcgtctgcggtgacagtgtaagcagagcccagcggatgcgtaccagccccggtcgggaactcggtgcactctactacaggtacgccgttcatcttcactacacgacggtctttgtaaccgtcgttgttggacggaccgaattcgatgttcaggagcttcggatgctccagcagacgcgaataggtatcgacatccaccagagtgaccatatccgccagcggggtcttgcgcttgatgagctcatcaataccagccttgtgcgccaggttgatgttcatggcgttagcctccatctcagcctgggtcagctgcgtggcggtagtggtacccggaaccaggatagctgcacctacctcgataccgtcattgaatgccggtttcaggtgcgccggagcaacccaggaacggcccttgatgagctgaatcaggtgcgcctggtcgaagacctctgcgaactcggagccgttgttctgacccatctcggtcaggaagtccggaccggtccagtcatcctgatagtcaatcgggttacggatgtacagcaccgtatccaccacgataatcatcttatcgttacggaccggagtgctatccagcgcctcaccggagcgacgacccttcaccgaggaggtgttcaggcggtcaatacggtaggtgtttgaaccgctgatagagcgctggctggagaggcccatgaacagcgcttggtactggaagcgggtatccacttcgttctggtatacttccaggtgaatgtctacgtcagacgccgcgccgccccagtgggctcttgtcagattacctttatagatagtgtcggtcatattttactttccttatttaagtacattagcagatgcataggtgtgcatcttcgctttagcttttagataggcatcccgcgctgcttgtttgcagtcaaaatgcccgaggtgtgttgtcttaccgcctagctttatgtaggcccgccacttgttagcgcgggaatcccaacaataacctttccacacagagttctgagcgttgcctgatttatcaactaggcgcaggttctcgattcgattgtctgctttatccagattaatgtggtccaccatcattccctctggtatatccccatggtgcatgaaccaaataagccggtgcgcatattctcgtacccgacccagagccccacggtcccaggtcacgcggcgatatccccagttattctggtaggtatccccgaagcgtccagtagccttgttaatcaagcgcccatcttctgtgtaggtatagcgattggctagttcttgcaagagattaatctccattattggtaagtattaaagacctacgcgcttaccagcttcacggcgtgcgagcaaatcgttataacgttgactgaactgtggagacgccaagctacggttacccgcttcctgacggagtttggtatattctgcacggaagtctgcagcagataatgcgttgttgctggctacgcctcttaccattgggttctgtgtcttgataagacccatatcccggcagaagcccgctaccaactcggcggcctgcttaagctcacctgagttagcgagtacacgagctgcgttacgcagaggttcaggggccttggaattaaacagctgcgctgctacctcccagctctccttaccgcccacgatatcgtaagcttcctgtactgctttggtggcttgaccaacctggtcttccaggtacgctttagccagcaactctgcataagcagcgtgctctccgaaacgttccttaatgaaggccgtatcgattaggttagggtcctgatactccagggccttgccaagtgcccgcaccatatcagagtcagttaacccagagacttgcttcaacatggctaccccggcgtcaatcgtcggattgcctgtctgagccagctcctggggctgctccttagcgctatcgccacccttatccagggctgcttttagggcttcgatatccagaggaatcttagcaggttcaggggaatctttgccctgttgctgctgggtaggtgcgggcgcatcctgcacgccttgattgttcggggcgttaaggggagcacctaggcccggaatcttagggccgccttggttctctacctgtgtagtttctacgttctgaccgttttctacgttatccatctatgcctctgttgttaacttggtaataagcccagctgcttacctgctactgttgggtctgctgctgtcaagccctggagttggtcctgtgctgcacctgcggatacatcggcagacgcatcttgaacttcttgcttctgttgcagctgctcttctgtgtacatgaacggctcgctgacgataccgtaggcgtcgaagtaccagtctacgcacgcatccttgttgaagcgtggagtaatctgctccagcaccgggatagccagttgcatggactgcgctgcctctagcagcttatccgctgctgcggctttagccagtgcagaggtacccaccgtaacgttgatgctcactacaccttcgctgaggtacagcttaaagcgaggatataccagtgcagtgtacaggtacgccagcttacgcagccatgtgtcgctcagaatactgaacccaccacccatagcagcttccgcctctttggcattctggcgaatctcataagccgtgacacgctcgccctgccgggagttaccggtgtacataaacgcacgagacagtttctgctcgagcatctgaatgttgctggcaatccactgaatcttctgggcagagccgccctcgtaagcagtgacgggggatttgctgttcccgttggaaccgccgccgcccacctgcacagcctcgcccgtctctgacgttgcgaactcgtctacatctaaccctgagcttgcgtcaattagcggaattaaccgcgcagactcaacctcgtagttagttaacgcttccgacagtacagataatctagcaaagtccccggcgtagtcctctaccaagccgcgcccgtagtgttcgccgctaacaaggttccacaccagcacgttgtagggaagctccagctccggataggtgctgctgtctccaatgcggtgcccgtctgcttcttggtacacctcgtagcttactacctctgcaccgtcctctgtccgcttaactttgcgacaagcggcagtgtagatatcaacgtcgccgtatgggtctttgtcacggtagaaggtgttccggaaactctctggcaggtcctggacgcttgcgcgctctctgataatgagtcgcaggacgttaccgcttccatcccttcgaacggtaaagttacggactgaatagacgatggatttacctgtccgctcatcaatatactccaacgcgttacctgtaaccagcagcagcttcacagcctgcaacttcgcagcataaccgtctttctcaaatactttctgtgacgccgtgttctcgacctcggccagcttagattctgccgtagcagcactgcccagcgaactaatgaactcgtccaggtccgaactcttggagaaccggaagaagctggtgccctgcgggaacagtgcgcctacaatcttagtggctgcggtgttgaccagctgcgcaccggtgctctggtagtcacgctccaggggcctgcgtctaccgtccagggaatcgtcccgggtaaagatagtgctgagcgtccactgcgcgaacttctcagaggcatccaagacaccagcgtcctggtccttcttaaagagttctgctaatgttgctttttgttccaagctacccccttacaggcccagaggattgctctgccctgcttgtcgccgtttcttctgctcagacgtaattgcatctgcagatgcagaggcagcccctgcggggtcaatctccgcaatgttatctgcggcgctattagcctctagggcagcctgttgtttcgctgcgctggcctgttgctctgccaagcgctgctgcgcctctaatcctgcgttgtcagtaaggccgagcatatccgtggccttgcctaacagtttacctaaaccaccactcattctgacctcactaaatgataagttgttttgtacgtgttaccagacgtgctccggctaatggcgatacgcccagcgcgcatgcacttggctattgcgtgcaggccctgcataatcacagacactgccgcaccattgtccggttttagtacgaagaagtctgtatacagcacaggctctacgtaatgacagtcctccacagcttctggatagtagctgacagcaccgactaatccgccttgggagtcatagactcctagtatatactgtttacccaatatacttcccagcactctccagtagtgctgctctggagccaggccccgactaatgccgtggcccagttcgtgcagttgcttcactgcgtctgtaatgtcgtcagacttatacagaaccttgagagtgtaatcggaagttttactagtgtgttttaacttcattcctactccggtaacttcatttatcagcagaagaagaaaggtgattccagcacttgccggatgtccagggaacctacttctggcatatccaaatccgtcaagtccgccccagctgctgctgccgcgcgagtaatatccccaagcaggtcatgctcttcgtataggctcacaaactgttcgcggatgtgtcggtgcatagcgtcaacgtcagctgcatgtgtagccagcgagtcgtgaataggcacgatgtccaacccttccgcgacacacagaaccatcatcaagtgcgtactgtccaggctgtgcacaaagttcggggcaatcccagaggctgccttgcgcttgttacaggtcttgaaatcccggttatgcacccgcatgacggtgaggttcatgcagtcaatgcgtacccgcacttcttcacgctgcgtgtaacggttcattacaagcccacccagcggcgtataccactgcagatgctggcttgccggtactcgtctagcgaggttctgcaagtaccccataactgccgcagcagctgggttcgcctcttcgatagcggtacgcatacgcggcgccaggtagcacgacaggttccacaggctgttagtctcggcaccctcgtatccctcggcgcaagcaccttcgaagatgtagtcgctgcagctgcgcaccgtagcgctgtagaaataggtcatactggggcgcttggtcatactgcgggtgatttcgttctctctccagtacgtgctctggataacgaaatcctccttgtccaggtccagtatcaccttctcgtccgtacggcgcttcacgtccatgtacaggtcagctttcttatagttaccctcccagtacaggttcgtcagacgcccgcccacagggtctctcaggagcgctgagagatgctgcccacctgagtttgtagcgtccatagcaactgggattcggctaatatgctcttctgggcatccagaacgcacagcattaaccaggtcgatagcggcggccaataggcaccaagggctgtccgcggaggtgaaagcagggcaatcaaacggtgaaactgtaagctgctcaatctctgcaaagttcgcatcaacccaagctgcgcggtcttcgaataaggtcttgtcataaccaaagcatgtggcgacatgcaccttgagccagaataagccgcgatcacccagaggttttcctctgccaaactcaagaagggctttctgcaaatcagaaccttgagggtgcagcgaggacttgaagtacaaccggtaccgccaatccacgcaggttgggaagtacagagctttctcatctttgaattcctctgccatttctaacgtagtcaaaaggctgcgcagttgcgacacacgcttacggtctgcgctgtaccacagggacatgcgcgtcttccactcaccaaaacggtcaagctcttcctctgtgtagttctcttttggaacaccatccaagtaccactccggtttcggctccggtactgagcgcggcatgcctatcccaacacccatggcccgtgcttcttgcaccagttccagtatgcgcttattaatacggtacggggtttcctgtgccttattaagcgcttttttaatgccatccgcggacttaaatgcttccgctacttcacggagacgagctctgtcaatgtgcgagttatgataggtcccgcgattgtcgataggggtgaggtatccaccatcccacagagtagtgtgctgcaccggcggtaccagcataggcggcttcatggttacagtgtcagcggactctaccagtttctggaaggcctccataacgtcgtcagccggatagagcatgctcagattcccgctacagttcttccactggaacaggcccgtctcaaacaccgcggcacacagcagacgccctacggagatgttctgggcattggtccaaggctcgtgcccatagtgcacgttctcggcactggcgcggagcgtacgcaggatgtgcgtaggggacttcgtacggcgctctgtgaggtactcatacacacggtccatgtacgcaggggctacgttgcgtaactgcagagccagtagctctgactgtacgtttctgcccagtgcggacattaccgcctgtgcagtctgacggcgactggcggactcgccaggggcgacgctgaacgcctcaaacattgtgcacaggctcagagtggtcaggacgtccaaggggactaagcgcaggaaccgtcggtacttaccaccaatgcccggggctttgacatttcgcatctcatcgatagcggcagcagccacctcatatgccgaggtgagcatacgctgcgtcatcggcaggttcataatcccgccattctgcagtgcgtccgtaatcagcttacgtgcccgctcgattccgcgaatcttataggtctcttcaagctccagctggcgcttcaccagtgcttcctcgggtactacaaccgtattcagggcgctaatcataggcgcttagtctccttggttatgtccggtacttctaactactgattgcgactcacccagagattgtacatctccagatagtctttagcggagctttcgtcgccccgttctactgctttctgccacatcccgtggcaccatgcgctaggcgtcaatgcacttacctcggtgttgctcgtacagttctgagtacttgtcggacttggcaatgtcctgctccagcttatccttgttcccggcgcgcagtctgtacttgagccggttccccaggcagtatccgtagaactgctctttcgtcatactgcgtgcaatcacctcaattgcctccaggtccgggaagaactggtagtgccgaggagagttcactgagtcagaaacagcctcgctcttcgaatggaagagctggaagaactccgctcgccaagaggtcccacactcggctaaggttataagtccgtcttctgcgcacgtcactaatctgggggagtctaggtctacctgtagctgttcacagatgtccttccagataccccctacgtgactcgctttgcgcacaaccaaatcacctgcatagaatttagtggattcaatcatttaatagtctcccgtgctttgcgtcgtgcccgggccttgcgggccttgagcttctgtgcttgtgctagttcttccggcgtcttgtgcgtatagtatagcatatccgtaggttctcggtctaagtaatcggcgaccctacgtagagattcagcaatagccccagaagattgcatgctaccaacaatccagcgcccagcggcagatgccactttgccttcccctccattgcacgagcgatgaagagcaccccgaatacgcccagtaatatgacagtggtcaacgacaacagaatcaccagttacccccttgattgtgaagtccaaaggtttgccgcagaggaggcatatacctccctggtctttggcaagcttaatagccacagagcgaatctgtgctcgagttattttacgcagcgccatgaaatccctcttaacatatgatataccgtactttgagccatacccaggcgtctagctatagcgttgctaccccattcccggtccccaggaatgtgcatttgccgcagatagcgcaccgtaccttcgttcaaacgtgagcggccgctgctggaaccctttgctgatttgcttttgtgggtccctccatgcaggtgctcagggttaatgcagcgagaatttccacaggtgtgctgtactacttcgggccactctcctgtgtgttcatagtacgccttcctgtgtgcggttgtaggttggcgtttaccgtcaataagcacccacgcggataggaacccagtctttggccgcccctttctcccatggtctatacaaggtgtactcattaccatacctcaatccccccaactacatccagcatagcattgtcgtgaatgagagaatccaaatgctcaaccgttcttcgatgtgttttgggtgctcgttcacgcagcgcatccagaatagtttcaagttcatcgtgtttcccctcgtagtataactcaatcgcccgcaggctcatttccttcgcagacatcttcgccattgtctgggtgctcctgtatccactgtatatgctgtttatggtactcgtgcagcgaatgcacccagtcacgcagactgggagtagtcaacagtgacatcagatactgataggcagaatctgacggggagcgccgcaggaacaggcattctgcctctgcgagtacgtcttggttgtttcgagcgtaagccgctacgacgaattctgcggcgtcctgctctgaggtaatagggtagatagcatcaaaggccgttcgcttgccacagggcttcccatcaagcaacgtgatgcctttgacgttatctgcgtcgtcccctgctagcatctgccaccagaagaacttcaacccgtgtgctcgtacaggcatagcctgggtgtcatcccacttaatccatccgaatgggtcctccagtgcaggccacactgtacctgtcggtatatcgaaccgagccatagggctgagccaagaatccttgtcctgggacatcaggattccccggtctccgaagctgtacgaatccattacaaagaggtcgtcggcctcgaagtagtcactgctgactacctgaataccctgctcagaatactggtctgggttctcaatcaggtgccgcttcaacggtgccttgagcggtagctcctgtcgattagcgcgctgcccctgatagggcttagccgtaggcaggtgccagcgcaagcacttagcacatcctgcaggcgtcaggtacgccactgcctctgagcagccgaccaggaacatatcctcaagcaccagctgatagaagcggcgtattgcggtatccaaacgttttactgtagcggcggctttgtacacgcaaaaatccgcatcgtacagcagaatcttcccagagttctgcggagctaactgctcgctaagctgggacaagtcaaccccgttgataatcatcagcgccccgtaatatcgcgggccttcttgtcggcccagttaacccaacgttctgcccactttgccttgctcagcttatcgccaaggtagcacagtcccgccaatggaatcagcgggagaatcaaagctacgtaaattgcgcgagatacgtacaacatacttaagcctccagttcagacagcaccagcacggtgccgagcatgtccccgattacttccggagtacgcaggctctggtctacgtcgtagatacaggagccaatctccgccaggccaacgctgagcgtgcccactacgcggataagtacaaggtcgtctcctcgtaacttatcggcatgtgccgccagatcgttgtgctcccggaaggctgtagcggccaggtccaggtccattccgtacagggccgccagctcatctagtgcgttgtagatgtcgtccagactaatattaagcaccccatacgccgctgcatcgtataccgctgagccgaccgtaatggcaaggttctcgtacgcttctaatactttatccattagtcaaatcctttcagtttgtgtttttgaatgaaggcgtaggctttggtctcagtggccgtggcctctgcgcccagggcatatgcacggcgccgggacttggcgcactggcgattcaagtgataacgctgcgcactaatctcgggacccagaaggcttgccctgtatgcgtgagagttagctgcccagcgccagtcgtctgctcgcttctgcaaacgctgtgcgcgcagaagcagaaacacagcgtactgttctttggcccatgtgattatgcgcatttatacccccaggaagttagctacttcgtcacgcttagcgcgcagtgcgtcagccttaaaggagtggtcaagcgcagcgttagctaaatccaaggattcttgtgcagcggcatcggcggctgcggccaattcaacggcgcggtcagctgctgagtaggaacctgccgtacatttggcagaagcagaatctgctttgcgggcttcttgctcgtaggcatacttcaagaggcgtaccagggtttggatgatattcatatgtgctctcaaaggcccctaggcggggccgtattagtttaggttagggttgattaggcttgaggtgcagcgggcgctgctggcgctacaggagccgcaggagccgctggtgcagccggggctaccggagcagcgggagcagcgggagcagcgggagccgctggggtcgcaggagctgagggagcctgcatagccgccggactcggaaccgaaccagcgttcagcagaatgtccaaagcactgcccgggaagtctacggccttgtacatatcctcctgaatccagttcttgctcttaccgtcgtcgaaggtgccttcgatgtgcagactatcccaggtctctttggttgggttgttccacaggaacagcttaatctcagaggcatccagggctggcatcttgataggctcgccggtgttcgggtcgaacttcggaatcgggcggataccggacaggtccacgatgttagacttcttgcccgcagcactggtgtgctcatcaatcgggaaggtgaaggcctgccccagacgctgtgctgcatgcttaatgctattgtcgtagttgagcttgtcgaagaacttcttgaagcctgctcgctcaaagttactgatagccatcgggtacgggcggatacgcttcacttcgccgttggggccgaacactacaatgccgatacgtacgttagccactgcaggcttaccagtaggcttaccacccttagtcggcaggcgcttaccaatttccacgtactcggtgaagtagccatagtactcacccttcggcagcagcacgtcctcgtacgcaccgccctgtgcggtttcccgcatatccacatcttgggtttcgattgctgcgtctaccagagcgttcagggatgccagtacattcgtagtcatataattacgtcctcgtttagtttaaatgatatttacgtgcagatgcaggtccggcctagcgattcttaagtgcggacttaatgcctgcagccgcggctgccgccacaccgcctgccgccaggattgccaacagcaaagctacaccgccgtagaacggaagcagtacccaccaccaggaccaggcgataacgccagtcagtttcagggttacaaagataaggcccagtacagaacagattcccattttcatcgatactcctaattaggttttgattatatcgccaacttttaaactaagagctgaggattcatctttataccaccgctctgtctcagatttgtgcccccagcagtcatactccagggttacacgatacacctggtattgctcatcccatacgggcgcacccactcgggtgacggttgcgtctagcaaattcatttgcttctccctacccatttcccggaatcgtcaagtaacatggggatgatttgcgggcatccatctgtaatcaccatacaccctagaatcggcttgcttcttgacaacttaccataagcaaaggccagactcttgttgtcgattaaacaaccgcagtgcgcaccaaagtacagggcagtgctgctagcggaatactgtatatctaacttcccatggaagtgtccaatcaccatggacttacgttcatgggctgcgttgagcagcaggtccccagatacttgatgttggaatcgcacaatacccagtggagtattcaaatcccaagcatcgccccaactccacccgggggctccatgctctgggaacaggatgtcccggtacttcttaatgaactgtacagggagtccatgagctttggctctgcggtagacaagagagccgtggttagagtcgcacaggagcaggttaggaaacaggttatgcagccgctccaggccaagcttggccttctctaactccaccccagcactatccaactccggactgctgtcgtgaaagctaatggcgtgcccatccgtctcatcgcctatctgcacaacaatgtctgggcagtactcgtcccgtacagtgcgcaaaaagtcgtacgcgtccggatgtgtgtacggctcgtgcaggtccccgataacgagaatacgtcgacaggtttccggtacaaacgtatccccaatgtcatccgttggggagggctggattagtttgcgggcttgcatcaaagcattattagcctttgccttgctgcccttgttatccatgaagatgctgcgccaatagcgcacaagctgacgagatacactaatgtccgtgtccacatccccgcgattatccagctcttggttgtagtactgagcagccagagcgttgtctaggtactggcccaggattgcctggtgctgctctttggtgaatagttttattaggctaacacgtgccattattgcctctcttgtgttgttcctactcgtatcacattaattctaggggaatcacagaatcaagccagagtcaacaaataattttatttaattatttagttgaccctagcatatttccatgctaccctaaccccctacaccacccaagggtacacctatcactactcttcgataagcttgtactcccccgggaagaaggtgacgccgtccccgggcctacttactaacagtccagggtaacttagttctatctcaccagtaaccgggtcgaagaatataaccgtgtgccttgtacctggggtgaagtatgctgcatacctcgggtctatcggctcaggcccaagatccatcaactccacaacactgcctgactttatactcattctaccttctccttactgtacatactcgtacccatctcagcctctgctgggaacgggacctcaccaatgataccgtagttaggccagagctggtggatacgcttaggtgcgtcctccatgcactgcttaaccagcaagctcgcctcacgtccaacctctgggttggcgctgtccaggtacagcgcatcgtgcacgttcgtaatcaggcacacctgattgtcgaaccagtcacgggccaagagtgcacgcagaaccataccagccgccaccgccatcaggaagaatgcttccccttggcaccagtagttcgccatctcggtttccttgtagtccatgaccttctgcttacgctgcccaggcacaacctccttccactgctctttctgacggaagctgtagcgggcaccagcagggctggtccacgtcccaatgcggtagattcgatagctgccgtcgtccgcctgctcccggtacatgcgaccctccgcaccggtacgctctacctcttccttaacaacagcgcggaagccaattgtttgcgggaacagcgcagcctcgttgtccaagaaagcctgtgcaaattccaccgtacatccagtagcaaacgcaatccccttagccgtagcgccatactgggctgcaaagctaggagccttaatacttgtacgcattgccttccaaagcggatgcagctcgtgcttcttgttgtggcagcgctcatatacttcttcatacggtaatccttcacggaaagctaggcggtaacagtgcatatccgtacctgcctgtagcaggcccagcagtttcttatcccctgtatgcacgcaggacataaccacttccagcgcagagtagtcaacctcagtgatgcggccgttatcaccgaatcggctggtgaatacctgcttcaccttggatttagccaccccatccccgtcctcatccgggcggggtaggttctgcaggttcgggttagaactactaaggcgcccggttacggtggcacaggtattcagtcggtggtgtatgattccggaaccatcaggacgttcagggattacgtactgcagcattcccttccgctctttgacttctccgtttgcatccagaacttcccgcaaatagtaagtaccagtgtccttctcaagcgtcgccagctcgtttaccaacttacagaactcgaacccttggcgagccagtgcctccattgcgtcagtgctggtgctgtatactggcgtgccgtcatgcagggtacgcgcctgccggaactctccgcgctctgcgtacttctcccggataacttccggaagctcctggatgtccactaggcccggacagaagtaaaggtcatcctcccacttaagtttctcctcctctgtatcaaggcggaatacttttggcagccccttgttcttaccggacttgtacgtggttgcaccgggtggcgcgggcatgtcgtccacggcaacccaagtgtccccgacttgccaatagtctgccttgacatactgcggggggaaatatggaaccttcttgcggtacttgataggtccgccgtacaccagtgcagacatatggaagtccgaaccgaagttgaaatccagcgtctccggcaagtccttcgggatgtactgctgcagctcctgcttaatctccaggatgcgctgctcctgctcttcttggttcttgcgagcaatcggcatattcacgaacaggccgaaccattcgcagtacgcccaagccagcaaggcatccatgcgctcccacacgtactgcatctgattgcgctgggcgaacgtagcgcactggccgtagaagcacagggccgtgttcgggatgtccccgttaaccaggtagtcgtgcagtagcatcgggtcaatctgggaggttagcacaccctgctcccacagaagcttaaccccgtctactttgtgcgtaccaccgtacttaggagccgtctcgtccagcgacggatacatgctctgaaagtccgaggcgatgtattcagaatgcatcgtacagaatacgcgacctccccgctttaggaaggcctcaaactcggcgcgcgcaaaggttaggaaccagctaatctcatatgcggcgttgtgagccacaatcagccaacagtcagctggtattgggagccattctgatacaggtgccgcttcaaagtgcgcgcgactgttataccgtacactctctacggggcctacttctaccgtaccgtcatcgtgcgtgcggtcaatacgccacgctgattctacgatgtaattatccggacagtacggggaagcaacactaccgtaatatgggtggttttgcgtctcataatccgttatcaggatgcttctgctcattccataccctcccctttatgatattagatatgtatccttgacttgtcccgaagcgtctcgctatagatatctgggtctcaccgccagcgtatgcttctcgtatgctgtgcacgtcttctggggtaagtctggcagcagggttgcggctgcccagcaaattacgcgcacctttatttcggtcctgcatattatcgctaggagtccctagtagcaggtgctccggatttatgcaccgaggattgtcgcacgaatgccggactacaagtcccgcgatatcgctcagcttcaagttgtgggctatacagtatgctttgcggtggctgccagttgtcttcccgtcaaatctggagcggccatacccagcgccctttcctcggcaagtgcttcccctctgtccgtggtcaatacaacctgtcatttccacttagccctccgagccttgttgatagccagatgcacaatcagctggctgctgtccagtgcgaatcgtttacggaaagtacctgcagatgcagcgtacgccttgattacctcgtcgtctaggtagttgatgtctgacggtttaagcatactagtaaatctcccagcagtgatataggccctacaatatcccactctctctgattgtaacgcgccccgagttccacggtacaaaattccccggtaacgcggtgtcgcaccacgtaactaccgcgtataagtcctgtgtaatccactttttggataacccctgtatagtctacttgcataaatcctcctgtgtacctacatagcgccctcgtagaaggcgctagggaagtcacttgattggtggcggaggttcgatagcctccagcagcggctgctgcagtaggtaagtgttgtactcctgtatcgcttgtactgccaacccgcgcaggcgcagtgcttcgtttacgtcccaagcagcaccggtggatacaagagagaacgcatcagcatcaaagttgaatgtgctctccttagattcagtcagtcctatgtaggcgccgctttcacttacggcgcacacagtgtaagtcctgccaatcttcacgccagtgcggtagaatatatcacgcggcacaacggtgctgcgctttactttatcgccaactttaaacttagacattaatttggccctcgtcaaatctacaacgacccggctcgaatcccacctcgaattgcaggagcgattctttaccagacagtgccatcttgttcttcggagtactgataccacggacgttttgcatgtgcggctgctcgttcctgtccaagcatcccatcataatcgccaagtccaaggcaccctgcacgccaatcttgctctgcttcatagcggtgagcggcgggaacagcatgttgtaaccttcgagtgaaagctgcatagtgcctacaatagcgcagtcgttctcgcacccaaggatacgcagctcctgccatttcgcctcaaggttctggtgctcactctccatagtgccgccacggatattcgccaccatgtcgatgatgattaccgcggggcgcatctcctccatgagcgtggatatctgcgccatcgtcaatgagtgcgcagccttaacacgaatccggtcagccctgcctactttcttgaggtaggctggcacgaactcttgcttactgtgccggtccttaatctccgccagagtccaatgcagcgccgcttgatataccctcggcactgtgcgcgtcgctgggccctcgttaaccaaccagaggatagggcggtccccgtacacttccggctgctgctgcatttgctcagcaaaatccacagcaatagcagcaagcagactagttttaccagagtccacaggagcagccactgcgatacagtccccgccacgtagacctcggatgttgctagcgagttgctcgaacacgcccagtttaagaccgccgctctcatcagtcgcggcaagtatctcgtcaacactaccgctctcccattcaagcagcgaatcatgcactgcagcgccatcaccgtacttgcgctgcaggtgcttcatctccaggaggtaatcaatctcctcaccgtcttggtagcgctgcgtaagcgccgctacctccccgctgtaggccagctcattcagggtctggacaatccctaccacagaatcctgcggcacggcttgtactccccgcataagctcgtccatgattacccgctcttcccgggataagtgccctgcccggaggttgagcatgctctgcatcgcatcccactgcacctcctggtgctccgggtacgtgttccagtacagccccacccagtccagaaggttcgaagtgtccggcgccagcatgctcttaggtatctgctctcgcaggcggttccacactttctgcgtgcacatcgcacgcacaactattaggtccaattagagcctccaagttttagctttcaatacatcgtgcactgctgacacacttacaccaaggctagcagctatggccggtgtaccgtgttccctgctgtaccgcctgtaggtcttcctgatatagtccacctgctgcgctgttagcttggagtacccattctgctcccctttagaaactccacgtctagccctaccccgggcaatacagtcatggacgttatccttgaccgtacctaattctaaatgctcgggattaatacatctcgggttgtcacacttatggcgcacaactagccccgctatgctctccggagatatatcgttcgccgagcaatacacctttctatgcaggggtatcttccgccctttgaacgtggtatttccgtaaccctttggtccgcctttctgtttgtgctctttacacgcgcctaataccatctaataactcctgtattgttgcctcttttgggtccccgtcgtagtagatttcgtggcacgacataaagggacgtagcgcgcgccgtatcatggccgcgccggagtgtcccgcttggtcattatccagggacagtatcactgtcggtttgttctgtatcagccacgcccttaactgcacgggcaagcgagtacccagcatagctatagcctgcacgttcattgcagagtagttcgtaatcgcgtgctgatatttgatcgctgatagatagtcctcggtgagcacgacctttagaggtgcggccgcagctacagccggtgctacggcaggtgccgcgacagcgaacggtaccggatggccgtacattacccacttcggttgctgccgagcatgcactgcacggcccagagcagcgcttcctacacggaagattatccgctgtttctctttgctccattctgcatcctccaccatttcaggcatgattccctttgtagtcaggaatccgtaaataaaactctgcgtttccgcaggcgcttggctaatgcaaattgcatctgcaggtgcagagggctgcaccctcggctcttcctgtaactgtatgcgctggtactgcttgcgctccttgcccacttgtttacagcggtggcaatagtattcccaggcatccgggttattgtagagcaccccagcggcgtccctgccacagcaccgaaagcgtgccctctgccccacggccaggcgcttgcacgctctaagccagggctggtccattacttatgctcgcgcttaaccgacatagccatgcggcgcaggtcgtgtgccaactgcagggctgaatcggggtcgatgttaatcccaatctcaacctttgcccgagtgcttcccttcttaggaactaccccgatgtacattaaaccttccccatccccgttatccttctcaagaactaggcgttggtcatttcccgggtcgcgcttggagttcatgtaggccaccttgtccgggaccggtggcagctcatccttcggttcttgatacagctcgaagttatcggcgtaccatgggtatgggtcggctcccccatctgtaaagttatccaactgcagccagtggccgcttgtagttatatctgtaattacgtagtaagcaaaatcgcccatgtacgacttaaacggcgaatggtttttgtgtgctttgcgaacaactttatcaccaactttaaacttagacataatcaaccctccacaatattatcgtatccaccccagtcttctacgactcgggtgcctagttcaatcagctcttctttgaagccatagtcggagaacaccatgatgtactccgctgccttatctggattctcctgtacccagctaataagttgttgtttagaaagctgggacactacgcggaatgcagccagcaattgagggtcctcgtccgggggcatgtcccacggctgccgtgaactgagcgttggtgcagagagccattggtctggctccattaccttcgggtccctctcaatcggaaggtgcgagaacgtaccatcttgcagtacccgctcaagcacttgccccaagatgttcaggtcaagcacctcatccggggtgtgctcgtgcatgtaccctacaccgacgttggtgcactcaggaatgatgccaacgaactcagccgagtcagtatacacacccttctgcaagtgctgctccgtgcgtcccaggcgctctgctagggtcttggcaaaggtgtcagagcagcagcgcatataccgttggtgcgtaatgattccgtcgccgcggcggtcaaagctaatcattgcctttacaccagtccaaaacccggtgtcatccttgactgacgcagcgctgccctcgcaacctacctcttcatccacgaagaagcagtagcgtccgtgcacaccccgccgcagcatctccagcatcagatatataccggcaccgcagtccgcacctaaacagtcagcctgctgcggattctttacgaacagtacgcccttgttagtacaaccaacgtccggcgcagcgctggttggacgggccaccgtatcgaggtgcgacgtaaacgctacgtcgctttgctctgagtcccccaccagcacgaagtagttcccgtgcttgtcctttacgtagtgcataccactacccagcgcttgcataagcagcggctcaaaccacttagtgctcgcccagctaggccggtgcgttcgcagtatctgcaatagcagctgcatatcaatcccgtgcggattcaagaacattaagctgcctcctctacttcttcttcgtcatcattgcctaggtacttctcgcccaagcaatcggctgcatactcagtgagaattaacccgtgcactgggtgttcttctgcgtgctgaataagcacgtaccgttcctgtgcacacactatttcttcttggtcgtgtactgtaccctctacatcacactccgcaacgtcattgtcgtatacgtaggcggtgtggtaatcagaccaggtgcagtcgtatcggttatgcagaccctcacgcccaactacgtatacatactgctcgttgtcaacacacccatcgcacaccatatccccatcggcggttacgtgcatgtcatctacagagtagcgctcctcgcagcagcagcaccgagcagattctgtacctacgtagatgtacccttctgattcctgcgcctcgtattcgtagtcgtcacgaatcaaaaaggcgtcactcccttcttcatctactccgcactggctgctatctagatacggcataagcactgcgccgctgtgttgcgggtgcggtatacgcgccagcaatcccccttcgagacacttagtgtttctggtgtacccatgtccgcgcaggattgcatccgcagcgttgccataagcacgaacatactccttagtatcggtgttcacgattgctcgtgcctgcacttcgaagtcgtccccaaacagctccccggtatactggatgaataggcgcaacccgttatccggcagcccgtggctggtggtagcgtacgtccgcacagggctatgctcaaatgagtacccgctcatgcagctactcgggccgttctcgtaggcgtcgtaccactcctgctcggtcttgcacaggtacgttgtcgggtttacgttcatagccttgaggtcttcgatggcatcgcggaagtctacgccgttgccatagtagttagcgagccacttaccgacgcgcatctctacgcagcggtactcagtaactgcggcgaagtccttgtgcatccgcggctgccccagcatcacgatgggctcaccgttgcggaaaccaaagcccaaaggcacagcgaatctagacactacgaaaccgtgcaacttcatgagcagcgcagcggcgttgccatcgcggaggtggcgtccgtaatcgtagccagtgtataagcggcgctgctgctcttctggtgcaagcataatgcgctcgaataactgcactgcctgcttgtgcaccttgtaaccggtgaactcttccacgcacgcaaccacgcgctcaaccactacatcatcaccctcatagaagtcgcggcggcgttcccagaacttgttgtcgatggtgatttgcgccggggcaaagagttcgtagaaagttcctgaccggtacaagtccgccttttgcaacgggccacgagtcatcattacttcgtgatactctgggtgcagtatcccgcctatagtcacctctaagccaggggtgtacgcgcttaccgtacggaggcccataagcgcctgcagcgtaccctcagtgtggggatggtcagccccttgcatttgcaagtcctggaacggggtccagtagtcaccgctggaatacattgattctttcattggcagtgcgtttgcgccttctggtaacactactttccattcgataggtgctgtgttagtctcttgcattttcatttgctcctgaatagattctttgagttcgtcagtaataacgaggtcagcgtgcgtaccacgcagcgagttgttgctgcttgtaataagcccggactgcggcccgaaattgcgtaaaagctccacgatacccgtaccgccgtagagccgcaaccacatcgaactgaatgtgctcttgcaaccgccgcgcggcagactctgtatactcccggtaggttgtgagcacagtgccaacaccctcttttctaactcggagtagtcgacgttcaactggcacgatttgcttgagttcattaggaacctctttgaatgtctcccaagtgcagccgcacttgccttgggtctccagcagacgccagcacagcagcgctgtttcgtctactgtgagcatacgctgtccttgaacaccacgttgcgggccacaaggacgctgcttcttagtgctataatcccgccaattgtgtgactggatgtcaaccaccgcatatcctccccagcgtagaattccgcactggcatgcagtgggccgcatagcgggacccggtatagtagaccacttggtcgcttgtatacatcgtacacactttgcttactcatactacacctcgcacattaaaccggtggcagtagccgcgcagggtcataccaaggcgctgcgcttgtttctcgtagtgctggcgcagcgctgccttcgcgttgtactcccgcgccagcccgtcgattgttggttgctgcttacgcatcagcagcgtctcaggattctttccgtgcataccctacctcaaatatcgttgttgctcttaccgtccaccgtgagcgttacagcggcgtccgggtactgctcctgcaccgccgcaaggatacgcgcgcccagctctttgcaaccaccctcggggtcttcaaagaggtcatactcagggcgcggctgcggttcctgcgccgccggttgctgcaactgcactgtgcaatagggcaccgggttgtttacgtcgttgcccagcaccagcatagcgctggtcacaatgatgttgaacacgttaaccataaagttgtctccagtcgttgataatgccaagattcacggcgtccagcacagtgcgggcagccatttcggtgtaggtatccacaaattctaaaggggattcctgattagtgtctttgtcagagaatatgaccacagtgtagttgtattctgcgtatacccgattgcaccacacgggccagagttcatggcccggatagaccagtattgctttcatatgaaacctcatacgccagttgcattcacatagcgccccgtaggacgctataggcttgctactaggccactgccttcaaagttgcgtccagcacagcacgtacatccacgccctgattaatgagcatactcaccaaatctgcgtcgcttacgccagtctctttggccttcttaatggcgtttttaacgcgccccagcgcttgcaagcgcactgcatcagcgtccagcgcgtcattcttcacctgctccgcttcggcagcgtacagggccatacaggagctatagaagctggcaacaataacttcgcggccctgcttgtcagcttgtttgtagtcaagacgcatagtgtccagttcgattcccagcttctcagccgacgcatagcacttcttagcgttgaactcgtacttaccggactctttgttgaacttgatgggtaatagcgtacgcagcaccatatcaaagtcagcagcgtcactgcgctgcatatccgtagcccaggaaacgttgctgctgataagaccgtggaagagcgcgctgatagtgatgttacgctttgcttccactacgtcgcccagcgctttacgaatgctacccgcagcggtgagcttgaatactttaccagttgaatgggtcataatacacctctttgattgatttactatcggttaatttcacatagcgccccgtaggacgctataggctattaaccttcaccgtagccaaccatttggcacctccctagttgcttagataattactccacatagcaccccataggatgctataggctgtaattagtgcccaaattgggagttaacagcaggccacccactaggctgtttactgccgcccttttgtttttgctttcccctcaccctgtgctcaccgctcaacccttgtttgctgggcttcacagtaagcggcacgttatcggtagggttaagtgataactgcatattccgccgtaatgctaggcgttttgctttgcgcataatctcacctctcagagtacataatctagcgcagccttgttactgctacgctatgttatatgctctttgcggggtacactccgcgccttgttccctcgattcagaggagcgagctgctctcgcctcggcagtatggtttgcctcagaaccccggtgataacgtccggcacgcttactctttttaactgattatctaggctcggtcgtcatcgtaccagtcaaggtactgggcctccccgcaaatcagcttactgcttgctatctaagttactcagtgaatcggaacttgtcaagcgtttatttcttactacttgctggctgtccagctcggggtattcggtagttcccaaccagcctgtttccctaaactccgatgagcatcacttcttaggggttatctcgctgttagcctctcagcgccctatcgtggttagggttccaatcgcgcatttactgttacacgacatattcagttactgcttggactcaatctagcttatgcccttcgcggtgtcaactctttttatcgagtgtctaacccttcgcactatctagctttaatccggcggagcctcccggctcggctccgttcagcacctcagcgcctcccggtgattgaactatagccgcattgaaccaaaagaagcaagtacttttttaaactttttatcgccaggagcaaaaagggtaagcagggcaaatacttagagccgcacttagaaccacactagggatagctctagggatagtcctatgctgcactagctgtagccactgctagccacatctagccagtactagccaatactacctaataccacctaatactgcatagagcagagcgcagtgtccgtacgcagtgtaaggacacggagtgatgcggtgactgtgtaggtatgtcagcctactgcgtaggcacagggacatactagtgagtacctagtgagtgcatagtgagtagtagtgtatatagtgccctaaacccctcctactccggttacttcatttcataatagctttcgaatgaaagtaagagcaaagggatagcattgggatagcgccgggatagtgccggagtgtgccgggtagtggaagtgcgccctagtggggagcgcgcagcgtagcacagaatccgcgcaatgtaaagcactaaggatagccagtggatagcctagtgcatactagggatagcactagggacagcactacagcgcactagctggcccactatggccccactactggccccgctggacaggcactaggcaggcacaaaataagcaaggcagagcacgcccctatggcccacagggagcgcacagggatagccccagcgccccatagcacgcactgagagcgcacaggaagcgccctagtgaacgcacaaggacaggcatagggtagcactagcgatagccctagaacgcagcacaggcccgctgaggccctctggtgcgcactagcaggcccactcagtgcccccccccccctaaattgacgctaggtaccccctatgggggcaattgggcgcgttcagggtgagggaggggctcgcgtgagtctaataaatttcaggtccaggtatagacctgctcgcctagactgggcctgggctttacgctgtgcgttagaagtgcagcaccaagctagcccgagtagccccaggggtaattgccgcagccccaggattaaacagagtaactttgtaggagctgtacccactgtagctactgacaccagttagcagcccatcaacagacccgttaaataccggagaactcaaaccgacaggggcttgagtaatgccgtacgggagagtctgtacagggctagataccagcgtaccagcagctacagcaccaggggtccacgcaaagctaaatggaacagaacgagcacgctctactgtaataccatccaggctcagtgtgttgccggtgctgttggtgaagcgcaaatctccgtcacccgttaggctgttacccaagtaaaagtctacatcgaaccaccccggaccagccggtaccgcggcaacagaggagccgccactacccactgctaaggttatgttaccagtagcgcccgggttatagactcgcaaggatacgcgcactatagccccgagaaggtgcagcggcaactgataccgacgcatctcctgtcccgcaggaacatccagtgccacggtactagcggctccagccctagtggtacgactagcagcagcagccccgcgcatgtacgcctgcccgataaacccagggccgaacggactatccccgcgcactacgttcatattcccactgtatacgcgaggagggttgatgcggcaagccctagtactactcagtgaccaggatagaacactgctggcatctgcaatgttcgcatcattgtcgaaggcatctacataaccaccttcaatggtccagaattccccttcgcatccatacgccttgttatcagaaataacaatagggccaacagctccagacctaatacgaatacacccggcatacaggttatggtcggagtccgggcggaagtgcgcaaaaccattacgggtaatccaagagcgcgacagctgtccaaagtccagtacgtgctgtgcagctgtgttagccccgtatggtacactatcccactcaaacttattatccgtaatccacaccaggtccgggttactgtttgctgtactcttaatccatgcgcccgagcacagtccgaacgtgttattctgaatgtgcaggttattgacgttgttattaggaatacctatgtaatccccgaggagtataacgctgccgttagaggcacccatcctacggaataagtttccggagatgtgactctccatacagtcacgcaacaccagcgcagagcccgccaagttattaaaagcagagttttccgccccaaaatagctccaggacgttacctccaccataagtcccgaatcactgctgacagccccctgcagtcgcattctaaggaacccgccgcccattccacgggtgctcgtaccgtcaaagtagaacatcttactggctgtgctcggtttaacgaatacagccccaagcgggttaacgccctctaggccatcacctataaacagcatagggttagtaaggtggcagtctccaacataataagaccccacaggtactcgcagcacctttacacctttagcggaaatccgctcaatagcggctgcatagttaccggaagaatccggacggagtccggtaagtaccggggcatccttcgctaagtagtcagctactctgcaccacaaatcgtcttggctgtagtaccgtgtttgtacgttctctactagtgccatgtgtcccctcttatcgtttcaattcagccagggctgtgcttacgttcttgtactggttcccaatggctttgctctgccactgcctgcgctcccataggccccagcacactttattgcgctgcccattaatatactgggagcagtcgaaggtccagcggttgctgcccttgtacacccaaccggtgccgggggatttctgctggtatttgctaatatagcgccagtccagtacggccttccctgctgctgcataatccaggctcttgagatgccgcttcacggcgctaccgttgaagccagctacgcctacattataaatgaagtctacagacccaaccagggctacgtcagagagctgcataggaagcccgtcaagagcctttgcgtgttcccctgctgattgtattagctgcttctgacaatcgctcagcgtggctctctggcccatcttgacgccctttgtctccccatagcagatagtagggaccccggcgctatccttgtaggcggtaaggctcaggccctcgttgtgctgaaccaccccggtaatggcaccgccaagcatagtggcccccgtaagggccgcaataaccttagtccttaaactcatatttaatagtccccttacgtgcctgctcctctaggagcttgaatgtacgtctcttgtaatacgcattccacgccagggttagcaccgcgcacaccgtcgcagtgatgaagctgatagtgctccagttccagctcattaactctgccaaccaacctcctgataccgtagcgccggtaactgctgcacctgcccgggtagcgaggtctgccccaactacgtcccctaccttaatcatcctgctgctccttcttcctgaacagcttacgaatcaccagaatgaccactaggaagaccagaggaatgctggccccagctaatccggcgaggataagactgtaactatcattgttaaccacctgcaggcgctctgcctggattgtaccggtgctaatagtttgcacctgcttcttactggacgtgtccaaagtgcctacgttagaatctgatacatcggttttgttggtggtgctggagtccaccttgttattcaagccaacggtttgcttggtgttttcggcaccaacctgagcagatacatccggcttagaaccaactaagccggtgagtgcagaggtcgccgagcaaccagtcagagtaaccgcgagcagtaacccagcgaccagtttacgcattagctagcagccttcactgcggctaccgcggcttctagcgcagcaatcttggtatcgaaggtagcacccgtctgggccacgttctgcggctgcgtaaggattgcatacaggtccttaccgagaatgttcagctgacgcagcagctcctgctgttgcgctgaggttgcttttgcaattgccatgtgtactctccttattctgccgcgtcagtggcggctacgaatgcactctgcagtgcagtgaacgaatcatcaaacgctgtaccggagccctcaccgagcggcatacctgtacccgtaagggcgacgtagccagtcttagagagctgcgagagcatgctgaacaggcgcgcctgcagcgtaccgtcatccttaaaggctataccggcacgggtagccgtataaccctgggactgcatgtacgtgaagaacgtgttcagcttagtcagtgcagtcgtacctacgaagcctacgttgtagtccggctgcacctgcttctccaggttctggcacgtgcctacaatggcgtactgtacgtccgcagttttagctgcgatgattgatgccattatcttcttcctctatgttgtttacctctgccgcggttctgcagccgagcagctacaccccggaggcccttagacactttgctctgtgcccaatccagtgggttctcaatgaaggcgcgcaccatcttctcagactcacgctcagccactactttctcatcttccaccaggtgcccgttcagcgtagccaccatcatggcgattgcgtctgcgcggtcatccttagccagactaccgcggtcgtacgtgattccagacaactgcgcgaacgcagagtacagccaacgtctatcgcgggagtaagccatacaagtgctgatatcgtcgtggatagcacgctcatgcacgaccaggcggtgacgccgagtaactgggctgattgtgtcaatgatgcgacgttccttctgcgtggagttgttcaggtcccttacaccaataccggcgagtcgccgctcccgtaaccggttcaggataagcatagacacggtgccgtgccccatgttgctctccaccaccatatccgggatgtctaactctacgcacaggtcaatcagtttatcaatgttctcttcgctgatacctccttggaagccgcctacggagaataggtgaatgtacgagttcgcagcacctccagcagcgtaggacacttcgtccccaccacaaccagctgggtccaccaccagcaccttatgctggtacggcaggtgcatgtccccgtagaatgccgggaagtacatctgctgacccataatcccctcatgctcgtgctgatacaggtaccggcggtccgcgatgtaagagaatgtctccggggaggaatcctgactgccagagtaaaccagcatatccgaaagcttgatgcgcgtacgcatttggtcggacagggtggtgtcgagcatgtactgcagctggaagccttccggaccgaagtccagctccttctcaatcagtgcatcctcgtcatagcgcccggtgtcagtgctctcgcctagcgtcccatcgacgccgaagccggtacgtttatagccgcgcccaatgagctccagtatataaggagcaagtgtactcccatatcgctcttccatttcaacagacggaatgcgcccaggccatacacgcacctcgaaaccacgccccggcagggttttatagatgctgtccttggtctgcggagtacccaggtacagcgtatccccgtgcgtacagatagctgcgaagtctttagaaatcatcagcagctgctcacgctgggtttgcgttaatccgttcttggtggtctcgatatcatccggaatcagcaggtccgcacgtttaccttgcagggatgcagtgatacctacacaggctacgctggcggatttctccagcggcttgaggtcacagtgtacgtcgtaaccttcgaatgaagtacggtccccacgagtagggtcagccttcaaatagcacagcagcggccacgtctcaatcatacggatgattaagttcgcaacgtcggacgcctgcttctccgcaccagacacaatcaggatacggcaggattggtcctgtatgagtcgccagacggcgtacagtgcggccagtgtagacttagcctcaccacgctgcgcggccaccatgcgcttcctggggcccttctgcatgtactctgcaatgtctgcctgcatgtccgtgagcgtaaagcccaggaaccgcataccgatgtacgcaaattcccggaagtcactcagcgcggcggccatcatcatagcgatgtcctcgcgctcctctttgggaatactgcgtggattcgcgctataaccagtaagtttctggttgagcatgcgcagtcttcgcgcagtcttcaccgataccattagacaattccttctagtaagtcctcagagtctgaaccaccaactttatttagaatctcttgcttacgcgcctctctacgcgccgctagttcgtcatcgaactcgtcacgaaggtcctgcatctcctcggaatctgcatccgcggtgatgtcgttgtccttcaagaacttggcgataaccgatttatctgcggcggggagtggcacctcgtcttccttagactgcttgatttcttcaatcaaggcctcagtgaacatgcggtgcagctccgagaggcgactgcgtttagccgcccctgccattatctaaccctcattgctcgaatataaccttgggcagtacaggtcccggtaaaggtggcctgtgctaccaggtacacagtggttgtcgcacttaaccgtagacggcgtgacataccctgtctggaagaattcccagctgctaacgtggtggttatggaatataagtcgtaccagttgctaggtagcactgcactggtgctactaactccaaaactgagagcagtaacgttgccgctattagtgactaacagggcactctcaagctcatactcccctgccggtaggctcaaggacagtacgttcagtggcgtaccactagtgacgcttacagctgccgcagttacggcactaagtacctctcccactacgccggtagctgctgctgtgccatcagtgcggccggatataccgccgctcagcccggttaatgctgtgatgtctccgttgctgccggacgctgctgctcccaggttggccctagcagtagcggcatcaccggccccggtgcctccttttgtaaccggaaggctgccggttgctcccagggtagcatcgcccgtaccatcaaaactagcaggcgtaatggatgttaaatccactaccaaagcccttgccgtggatagcttcgcagccgaatcagcggcgccggtggtgttaccggtaccgccttgggccttactcagcggagtggtcagcccgtttaaactcgtgatatcagagttagcacccttggctgccttggcccctactgctgcctgatagtcaagaattatctgtgcatcagcattagccctagcggacgcctcctcacccagggccgtagctgttgcgtaagtttctgacagctctgcgtcataccccaatctggcagacaccaaagtacccgtaggaagtacctctgcgaatagcagctggttatccaccacaacaaagctatagccaggtatctgacataccccgttaatatacacaatagccttagtaaaagaaataccgggggtaactgtgtcagtatcaccagacagcacagtataccacgggtagcttacagtaggctccccggatataaatgtctgctctaagttagtggtcctaacgtctagcgcatcatctgcggctttgcgtgtagcagcttcggcgtcaatacgtacacctagagctacatcacctgtatctacatactgcttgttagtggcatcagttgggtccgcaggtgtccccaggtgggttatacggtacccatgcatattaatgtcgccatagaacccgtcaatcgctcggccctcaaccagctcttgggctaggtgcaggaactgggtattctgggtatctacgtttacttcgatgaacggagcaccactagcaaactcaatgtataggtactctcgttcagtcttacgaattaggagcaccactgtctctgcagacagtggcgagttcagacgaatattggtggagctggtccaagtgaaggcagtagtctcagcaccatctaagtaaacgtgaatataggacttatccaggtactcgatatcgcactggatatcctgagtacctgcaggctttaccgactcttgccagctgaacgccatattaatcgtctccgaagttattgatgatagctcgcgtaggtgcgaattcctggattagcggtacctgcttagtgaaggtcttgatatccatattaccggtagccaggtcctgtacggccccgagcagccctgtgacgtaacccatagatgccaacgagtgacggggagaatctcccaggaagatatcctgtagtaaggatactccgccaatggcactcatacccattacggactcgccgatgagcttctgggtgtctacgtccttcccatccataccgtgcttagccatagtagccagcagcatcaacgggaactggtacgccataatgtgggctacaccaatccacccagcatcgttcagctctctacgcagaatcttgttagtggcagccagtgcgaagctctggtaccctacaatgactttgccgataggattgaactgtgcaaagtgtgaggtctcaccggtacgaacctgctgtaccaagtagtccatcatacgcgtccctacaacctcaacttgcatttgcaggtccggctggaacatagcgccagggttagccttgttggcagcgatagcgcggtccgcaacgtcacgagtaagcccgaaacgctccagacgcttaaacgcatcagcgtcacccttgaacatctgcgtaagctcatccgccacaatgcctgagtttaggttaacttgcagccggtgcaccatgctcataccattgacgtgacgtgcagcctgcccaacgttctgagtgacgttgaaccaagaggcctgacgggtcaggtccaggttatcgtcggcgtacgtattcaaccagcggaagcgcatctccttctggatattaccacgcagcacagtgtctagacgggcagccatatccggagtcttgatagctacggcaccttccttgaaccaaggctggtcacgcatactgcgcagcactctagccataccgaactccttcatagccaaagcagtatcagtcagctgatacaggccggagttcttaagcatggtggcgttagccatgttcccggctgcacgcagcaaatccggaagctgtccagcgtcagcaggtgccccacccaggataaagtcgatggtgtcattgacggtcttctcccacttagcggaatccgctagcgcgtgcttagactcatcaatcatcttagcgagctgtcccaggtcctgtacgcctgcataggccatgcctacacgcccagacatacggttagtgtacccgtgcataaccttggctacatcagtatccatcaggtcctgcatgcgcatgctcttaccgttcaccagatactctttgtccatgttgaaccgagtacgctgacgcaggttccgcgcaggggatgtgctaccggattcgcgtacgttaccagccaggaaactctggattgcagactcatctacaccagcgctacgcatagccataacgacctcgtcgttacccataccgttaatcagctgcttccacattgggccggattgcccggcgcggccgttgtagataccgtcaaccatctcctttgcaacacgctgcgctacctctgactccatgctcgggtacacgtcccgcagggcggaccggaacagggcgcggtagtcgtccagagtgttaccctgtgcgataccttgacgcatcttgtcgtagctgtactgccgcgggaagtagtagtcggatttaaccaacgcaccatcatccactagcccggcattgagcatatgctcgtgccacttgccggcccaaccagagcggcggtaggcgtcaaccagcggagcaatctctgcatccggcaccggcacagcgcggccg

SEQ ID NO: 42 - DNA, 43777 bp, Unknown
  source: /note="Description of Unknown: KP2W-P0202 Bacteriophage sequence"
attatagataccgtcaaccatctccttggcaacacgctgcactacctctgactccatgctcgggtacacgtcccgcagggcggaccggaacagggcgcggtagtcgtccagagtgttaccctgtgcgataccttgacgcatcttgtcatagctgtactgacgcgggaagtagtagtcggatttaaccaacgcaccatcatccactagacctgcattgagcatatgctcgtgccacttgctagcccagccagagcggcgataggcgtcaaccagtggagcaatctctgcatccggcaccggcacagcgcggccatttacatcagcactgtaggcagcatccaggtacttgctcaggcggtcttccagtgcagcccgctcagcgcggaacttgctccgatggaagaagcgctcagagaaacctacacccttatccttcaacgcacccaggatagcgtcttccactacgctggcgctggcgtccatctccaaagtaaggttgcgtttgaagtccactacggacgggcgacgaccccctacggcggacgcatccgacactagcagcttagccaagtcttcgttgccttgggcgatgttatcgtacagggcaaacatagtggagagcttcttcttagcgccgtccagcatagcttgggcacccttagcctcgttgagggtagtgctgcccgccaggtcctggaaggcttcgctacggaagctctgggcttggtctgcgtagtccttagctgtccacttaacggcgtcctcatacgcatccaggacgtcctccaaggcagagcctttggccttgatgcccagggcgttcatgatgtactcacccagttggcggagcatgctcttaccggttggggatttcgtccgcgccagatgctcaacccactcagggctgtcgcctaagcctgccagcatctcgtgcacattgcttgcgtaataccgcatacgcggcgtcaaggtggagtctgctgcaataacagcgcgcacttcctccaggcgcttagcaatctcgggattactgtcaacggcgcgtgcagtggcggcatgaatcagttcgtgcacggctaccttgctggtgtctgcatccatagcgcgcagtgcgtccccggctgtagtccaggtgctgccattagctcgcttaggtgcgcgtagagatacctccccgcgcctagctaaatcttgttgtgcgtaagtgtagcggctgcggtttgcggagcctgctaccagtttaaaatcaatgtcgtttacagcatcacccagcgtgtccagaatagccttctggcctgctgtcaagtgttcagacttcttcaagaactgaactacgtgctgtgctttcatgttcacggaggcggtattgtttctcgatactaggatgctttcatccagtgtcttagtgagaatttcctctccctctcctactccggtaacattagcatccctcgctgtacgagttgtaggcgcttctgggtcgaacataggctcacgcccagtacgagccttagcggcagctttagcagccctagacatatcccagagctggtctaacccagctacgcccgctatcagtgcagttaccgcggcggactggcccagttggtcctgtgcatagaatgcagtacctacatcagcagcgcgtatggcggtacgtgcagctaagcccgcgcggccagcaataccggcggcaggcatcggggccagtatgaacggggagtcgcctaccaacatacccgcgaacccagccactgtgttgtcagccattaagcggtcacggtcacgctgctcaagcatctgctgcatgcggtagttataatcttcgaccgacaccgagtcgtgtaggtactcaatctcttcctgatttggggcgtacagcttagctcgggtgtcgctactcagggtctgcttggcattaaagttcaggtctcggtcaaatgccggagcagaggccttacgtatagccgcagcgatgatgctgttacccatacccgatgcaaagctctctgcggctgtagtagctggggtcttggcctgcgccagtaaggaggcacgctccagcgcgttcaggccgttatctccagcatcattccaatctacgcgctcaggcgcaggtttaattgttgcgcccttagcagaatccttttcctgtggattcggttctcggttcagaaactgagccataatatctcctaaaagaattttgataaggggaggccccgaagggcctctggttagtgcgttgcttcaaagagccaatcacgtaggttttgttccaggtacttcttacgctcaggttgggcctgcttgtacgcagcggtattccgcagcgcttgccaagccctaccctgggcctcagatacagggtactgatacgcccccaccggggacttagcagccttgcgcacctgtgccatcgcctctgctacggggccagagctaccgttaccgccgtgatagttcaggtccaccatgacctttaacgcctcgtcggaggcagtcaaaccctgtcccttgagttgcttctgcacgttcggtatgtactgcttctccagtgaggatttgaggatactgacaccgtcgtcaatggtcactttctgtgggacgggcatgcccgagttaacgtgcagaccgaaacctacactacccttgcctttgcctccccggaacccttcgaacttcatagtggtagcgagaatgtcgctaaacagcgacggctccagccctaccgagttacggccgttgacctgtacgctgacagcacgcccgttgtcgtggtcgtagaaggtggcgggacgcactcctacttgctcactgccaatcttcatatctccagccagtgccgaatcgtacgcagcctgcgcagtcgtctgaacgtctcgaaggttcacagacatcgtctggaaggtgcccttcttgtcgaacacggttacggtcatgttctgacctgcgttgcccgcagtggcggcctgcactactacacgctctatgttgctgtggtctgacatatactgaacctggttctgtatatgctgctgcagggaggccttgaattgctcttggtcgcccttataatcacccatgatagattgcacagaggtgcccgcgggcagatacacatgcctaggtgccccagcaatgtccagctctaacttacgggattggatattgccttttagcatcgtattgatgtcgtcagcgtccttccctacaagggattccgggttgtgattatacatataacggtactcctcttccatagcagcgcgagcttcctggcgctgggcatctgcatccccgaagaagctaaaccagttggccgtgccacttgggtccaccatcttgtccgtggggttactctggatattgctgtagcgcccactggccttattgcgtgcctggcggcgaaggtcgtccaagatagtgttactggcattatttgggttttgtgtaacagctttctgcaccactccacgccactcagatgggacctcagacagcagcgccatcttccctaagtccgtactggtgctataagcctgtgcccataagttgatgctatttacgttctcgcgggaaacctcaccatcctcaccgagctggtccagcgtagtcagcgtacgtgccatatccgaagacatacgcttgtgcgcttcgttgactgcccacgcatccttgctgttgctcccgtatgccagcagctgcaggttcccttccggggtgtccggaaagcttttgagcagctcgttgcgcgccttacccaggtcgcccttgtacatccccgccagggtggagcttggcatgtttccagtaattgctgtgcgcaatgcctgggtgtccgctgccttctcgcgaatggtctgggccttgttccagaactccatgctggccccagcgctgagcaccccattggttgactgctcaatgattcgaccacggatacgctgcatagtctgctcttgctgctcaggagtctgcccttcaagagactggattgcatcggagatttcgaaacgggcttgggtctcaatctgagcacctgcgcgcttgaactcctgatacagtgccgcgttgacgtccactgagttaaccccgagttccttggtagctaactcttgcagctggtttattaccatcgggtcctgcgtctgctgcgccacgctgaccagatactgcttggcccggtccagcttcttgctcttatccaagtgctcagcagccagtatgctatctaaaccggtcttgatagacatctgcgcagcggcaccctgtcccgcctgcaggcgctgatagaactcatcactggacgagctaaggccgcggtcgagtgcacggtcagcctgcgccagggcaaacgcagctctacctttctggaaggctgtgtagttcgccatgctggtagcacggagctgctgcagtatattcgtggcagactgtttggacatgtccgggagatacatcccgagcttgtctgccattgactgtacgtgctcttgctcctgctgctggaattcctcgtcagtcagaccagactcagcagctttcttagctcgtgcgatgctatctgtgcgccacttggctagagagtcgtacgcggcggcggatacgtagccatcctgataggcctcacgtacgaagatgttctgcttctgtacagcctcatctttggaagccattgcatctactgcgccctgggcatccattgcgccgcgcaccgttgcggctgcagcgttttcttttactgcttcgtcaaaccctacgccgaagtcctgcacgaaccctgacagggcagctaggcgttttgctttggaggtatcaacagacacctcacttaccgttgacggtaagctaacatcgttggactgcagttgcactcctccgatacttaacccctgtctactgggttgaatcacaggcatttgacattcctcttaagttaccaggtatgaactgagctgttacctttgctcccccataaatcataggaggacgccatgttctgagtagctgctgcaccacttccgggtgttgagctaccagagtcagtagacgacgcagcgttaccagcgtactgcccaacggcagatgccccgacactcaacaacgagttaaacatgttatcgtaggggtcctccatgtccatgttagccaggccgctgtccacggccttgtccgtcattagacggaaaccctcttcctgagttgcctgctggtcacgcacgctggcctcttgtcgtccggctacagtgttcactgtggctacggcgtctttaacagaggcccccatagtaccggaagctgctgcctgcagccctacttggctctgtgcctgcagcttctgctgctggatgttaaacagagatacctcagtccggtccctggactgggctcgctgtagcgcgatgtcgtttagctgtttggctgtctgttgaatcacagccttgttcctggccttggacacttcaatctgagcaccatgccccagaacggtcttagcggccatggccgcaaccatccaccacatattaaattctccgtctgcgttggttgtagcgcaggatgtacgagatatccagcacattcagttccatagaaccctcagtaaataatgacacctcggttgtgtctgcgttagtacggcatggcacggtaatcgtagccaggtccatacgcaggacctgcccgagcgtcagctcttttgagttcatcaggatacctgtcagttccccgccccagttgacatcccgtggggtgtctagtacctgcacatagaagtgcccagagttacgtaccgccacatccaggcgcagcaggcgcacgtgcccactccccacgagcttgtcattctggtcccgcagaataggtgtagttagcgtgaacgtactgcggtaacgcctcccgattacgtaggtgccatcaggtacaccgcgtacaacccgcagggtgttctccccggcaatctcctttatgccaacctcagtaggtcccatagggttactgggcaagtaagttaggataagctcttcctcatagcggtcagcccacccaactggacgcagtactgccggaacggtgaataccccgtcctgtacttgaacttgcttctgcaaatccgagtacgcttcgcgatactccgaacccagctggtaaccttcacgcgggtccatagacacaatcaaaagcttgttgctgggactgggcccttgcatgtacaagaacacttcatcctccagcgcttgtacgctcaggattggatacgggaacgaccacttatgccacgccgcctgcatcttagcgccgtcacttccgccccacatgaactcgtagaccagcaagctactacgctccccagacatgcgcgagaaggccatattggtgacactggagttttgcatctgcaataccctgcctggggtataccgcggtaagtgcaccgtagaatcctgtgtagtatactgcgatgaagtatacggcgatgggatcaactcaagaatacccgcgtagctgtcgttgcgcttgttcgggtaaattactgtctgccctgccatgaccggagtaacgcgactatcgcactcataggtgctggtaatgctaatacttgcgttagtgggggtgagcactgctgaacccggcacaacggcctgcatgctgttagcaaacaggaccaggtccctgttaaactgtacagcggtacggtacacagaatcctgcgcagacgcagagctaatactgatacggtccgtatccagcagtgacgtcacagtagagcggtagaagcgctgatacaggcccgaggcggacatatccacagagctgccgctaagcagaaccaggcgaccctggaaagctgcaatgccagtaatgtagccattctcgacgaaccccggattaccgttgttatcgtcgttgcctgctaagcgcccttcccaatcccgcgcaataatattgtcatccgcggcaagttctctgggcatgttcgtaatcttggtgatgctgccgtacgcccccacctcagaccaggtgcgggtgctgtagctgaactgataccacgctgtctcagacgaggctgtacctacacggcacattgctccgtcagcttgcgctgggagctgtgcaggcaggtcctgctcctgatctacacgggactggttggataccccagcgtaagtatcaccggcgtcagaggacaccgcgcagttgctcagtccacagaagaacaggtacgcaccgcgtacgctcacgttcccggcgggcatgccattagctacaagagagtcccgcagctgctgagcaacgtaggcacctgatacctcctcagcgttaccgctggtgctgccagcagctggggcggtgtagtcccctgagtagtctacccctgcggaggtaactgtgacgttccagcgtttctggaatgctgcagacttaacgtagaagaaccccgtggtgctggggtcgatacgcccagtattgtccacggttgtgctaggagccatctccgtattcaggatataagtcagtccggcaatgcttgcggtctgcaaagaggtctggcctacggtggtaacgaagtacgggtcgttgccggaattaaggatggtctttccattcttagccagcaaccaccagttaccgttgctggtgttaatcagcaggtgcctaccgtcagtgccacgctcgacgtattcagtgaacagggagtcaagcccagggttatcgattgtgctttcccatacaatctcacccggcggtctacggcggataccggaaaccgggtcgctgagcatattcagctgcgcccccagttgtcctggttggcgctctctcggaacctgctgggaaacgccctgcagcaagctctgaatagtaccttctaatgattgcgccataacctctccttagaccataaaacgagcgcggcggattctgcgtgcaaaacgggtcttgctggtgctgaacttctgattgcgcagatgctcgcgcagcaccatgctcttgtaccgctcagcttcctgtgcgtaattagcgtagttgctgtcaccgcccaggtcatttaagtatacctgcgcagtggtgtagttagccacccacatagcggcgtgctccggcaggtcctcaaaggccaaatccagtaccacacgaatacgcacaggcgcatcgaagtattggttctgctctaccaggtcgtataggttcccgtcacgtaccccgtacttggattctgagcaggcgtcatatacagccagctggttccacggcaccttaatcaggccgtcggtggtgggcgtaacttcacgctcgaccacgttaaaccagaatcctgtgctgagcaacccacgacggttacgtgcaagtgcagagcgagctaatccagcgctagggttactagtgttgatgtccataacgcgggactcccccagggcttccagcgtcaggttcacagcgtctaattctctcatatttgttcctctattaaagaccccttggacctttaagacagggacaaaaaaaaaaaagcccctggcacccgaaggcaccaggggcgcgtattactcttccgcagtatcagcggctgcatcagccgccttacgggttttcttggtagccttgcggccagactcgaccgaggccacctggatgttcttcgctacatcggtggcggccttaaccgcctcccgctgagctgcattggcctggagagtctccagaccgaacgtagcgattactgccattgaacctccaattaggacttggtggtgaaggtgaacttagtcactgcagcggtgtccggacgacgcaggcctatgttgtacatcgcgtagcagtccagtacgttgctgaactcgcgcgtatcgtcccagatacgggaggtgaacggcttagcttcaacagtcaccagggtcttggacttgctgaaagtcaccatacggcacagcgcgtcgtctgcggtgacagtgtaagcagagcccagcggatgcgtaccagcctcggtcgggaactcggtgcactctactacaggtacgccgttcatcttcactacacgacggtctttgtaaccgtcgttgttggacggaccgaattcgatgttcaggagcttcggatgctccagcagacgcgaataggtatcgacatccaccagagtgaccatatccgccagcggggtcttgcgcttgatgagctcatcaataccagccttgtgcgccaggttgatgttcatggcgttagcctccatctcagcctgggtcagctgcgtggcggtagtggtacccggaaccaggatagctgcgcctacctctataccgtcgttgaacgccggtttcaggtgcgccggagcaacccaggaacggcccttgatgagctgaatcaggtgcgcctggtcgaaggtctctgcgaactcagagccgttgttctggcccatctcggttaggaagtccggaccggtccagtcatcctggtagtcaatcgggttacggatatacagcaccgtatccaccacgataatcatcttatcgttacgaaccggggtgctatccagcgcctcgccggagcgacgacccttcaccgaggaggtgttcaagcggtcaatacggtaggtgttagaaccgctgatagagcgctggctggagagtcccaggaatagagcctggtactggaagcgggtatccacttcgttctgatacacttccaggtgaatgtctacgtcagacgccgcgccgccccagtgcggacgagtcaggttgccattataaatagtgttagccatgccttagtttcctttataaataaaattaaagacctacgcgcttaccagcctcacggcgtgcgagcaaatcattataacgttgactgaactgcggagatgccaagctacggttgcccgcttcctgacggagtttggtatattctgcacggaagtccgcagcagataatgcgttgttgctggctacgccccgtaccattgggttctgtgtcttgataagacccatatcccggcagaagcccgctaccaactcagcggcctgcttaagctcaccagcgttagcgagtacacgagctgcgttacgcagaggttcaggagccttggaattaaacagctgtgctgctacctcccagttctccttcccgcccacaatatcgtaagcttcctgcactgccttggtggcttgtccaacctggtcttccaggtacgccttagccaacagctctgcgtaagcagcgtgctcgccgaaacgttccttaatgaaggccgtatcgattaggttagggtcctgatactccagggccttaccaagtgcccgcaccatatcagagtcagttaacccagatacttgcttcaacatagctaccccggcgtcaatcgtcggattgcctgtctgagccagctcctggggctgctccttagcgctatcgccacccttatccagggctgcttttagggcttcgatatccagaggaatcttagcaggttcaggggaatctttgccctgttgctgctgggtaggtgcgggcgcatcctgcacgccttgattgttcggggcgttaaggggagcacctaggcccggaatcttagggccgccttggttctctacctgtgtagtttctacgttctgaccgttttctacgttatccatctatgcccctgttgttaacttggtaataagcccagctgcttacctgctactgttgggtctgctgctgtcaagccctggagttggtcctgtgctgcacctgcggatacatcggcagacgcatcttgaacttcttgcttctgttgcagctgctcttctgtgtacatgaacggctcgctgacgataccgtaggcgtcgaagtaccagtctacgcacgcatccttgttgaagcgtggagtaatctgctccagcaccgggatagccagttgcatggactgcgctgcctctagcagcttatccgctgctgcggctttagccagtgcagaggtacccaccgtaacgttgatgctcactacaccttcgctgaggtacagcttaaagcgaggatataccagtgcagtgtacaggtacgccagcttacgcagccatgtgtcgctcagaatactgaacccgccacccatagcggcttccgcctctttggcattctggcgaatctcgtaagccgtgacgcgctcaccttgccgggagttaccggtgtacataaacgcacgcgacagtttctgttcgagcatctgaatgttgctggcaatccactgaatcttctgggcagagccaccctcgtaagcagtgacgggggatttgctgttcccgttggaaccgccgccgcccacctgcacagcctcgccagtctccgacgttgcgaactcgtccacgtctaacccagagcttgcgtcaatcagcgggattaacctcgcagactcaacctcgtagttagtcaacgcttccgacagtaccgataatctggcgaagtccccggcgtagtcctctaccaagccgcgcccgtagtgttcgccgctaacaaggttccacaccagcacgttgtagggaagctccagctccggataggtgctgctgtctccaatgcggtgcccgtctgcttcttggtacacctcgtagcttactacctctgcaccgtcctctgtccgcttaactttgcgacaagcggcagtgtagatatcaacgtcgccgtatgggtctttgtcacggtagaaggtgttccggaaactctctggcaggtcctggacgcttgcgcgctctctgataatgagtcgcaggacgttaccgcttccatcccttcgaacggtaaagttacggactgaatagacgatggatttacctgtccgctcatcaatatactccaacgcgttacctgtaaccagcagcagcttcacagcctgcaacttcgcagcataaccgtctttctcaaatactttctgtgacgccgtgttctcgacctcggccaacttagattctgccgtagcagcactgcccagcgaactaatgaactcgtccaggtccgaactcttggagaaccggaagaagctagtgccttgcgggaacagcgcgcctacaatcttagtggctgcagtgttgaccagctgcgcccctgtgctctggtaatcacgctccaggggcctgcgtctaccgtccagggaatcgtcccgggtaaagatagtgctgagcgtccactgcgcaaacttctcagaggcatccaagacacccgcgtcctggtccttcttaaagagttctgctaatgttgctttttgttccaagctacccccttacaggcccagaggattgctctgccctgcttgtcgccgtttcttctgctcagacgtaattgcatctgcagatgcagaggcagcccctgctgggtcaatctcagcaatgttatctgcggcgctattagcctctaaggcagcctgttgtttagctgcgctggcctgctgctctgccaagcgctgctgtgcctctaatcctgcgttgtcagtaaggccgagcatatccgtggccttacctaacagtttacctaaaccaccactcattctgacctcactaaatgataagttgtcttgtacgtgttatccgatgtgctccggctaatggcaatacgcccggcgcgcatgcacttggctatcgcgtgcatcccctgcataatcacagtcactgccgcaccattgtccggttttagtacgaagaagtctgtatacagcacaggctctacgtaatgacagtcctccacagcttctggatagtagctgacagcaccgactaatccgccttgggagtcatagactcctagtatatactgtttacccaatatacttcccagcactctccagtagtgctgctctggagccaggccccgactaatgccgtggcccagttcgtgcagttgcttcactgcgtctgtaatgtcgtcagacttatacagaaccttgagagtgtaatcggaagttttactagtgtgttttaacttcattcctactccggtaacttcatttatcagcagaagaagaaaggcgattccagcacttgccggatgtccagggaacctacttctggcatatccaaatccgtcaagtccgccccagctgctgctgccgcgcgagtaatatccccaagcaggtcatgctcttcgtataggctcacaaactgttcgcggatgtgtcggtgcatagcgtcaacgtcagctgcatgtgtagccagcgagtcgtgaataggcacgatgtccaacccttccgcggcacacagaaccatcatcaagtgcgtactgtccaggctatgcacaaagttcggggcaatcccagaggctgccttgcgcttgttacaggtcttgaaatcccggttatgcacccgcatgacggtgaggttcatgcagtcaatgcgtacccgcacttcttcacgctgcgtgtaacggttcattacaagcccacccagcggcgtataccactgcagatgctggcttgccggtacgcgtctagcgaggttctgcaagtaccccataactgccgcagcagctgggttcgcctcttcgatagcggtacgcatacgcggcgccaggtagcacgacaggttccacaggctgttagtctcggcaccctcgtatccctcggcgcaagcaccttcgaagatgtagtcgctgcagctgcgcaccgtagcgctgtagaaataggtcatactggggcgcttggtcatactgcgggtgatttcgttctctctccagtacgtgctctggataacgaaatcctccttgtccaggtccagtatcaccttctcgtccgtacggcgcttcacgtccatgtacaggtcagctttcttatagttaccctcccagtacaggttcgtcagacgcccgcccacagggtctctcaggagcgctgagagatgctgcccacctgagtttgtagcgtccatagcaactgggattcggctaatatgctcttctgggcatccagaacgcacagcattaaccaggtcgatagcggcggccaataggcaccaagggctgtccgcggaggtgaaagcagggcaatcaaacggtgaaactgtaagctgctcaatctctgcaaagttcgcatcaacccaagctgcgcggtcttcgaataaggtcttgtcataaccaaagcatgtggcgacatgcaccttgagccagaataagccgcgatcacccagaggttttcctctgccaaactcaagaagggctttctgcaaatcagaaccttgagggtgcagcgaggacttgaagtacaaccggtaccgccaatccacgcaggttgggaagtacagagctttctcatctttgaattcctctgccatttctaacgtagtcaaaaggctgcgcagttgcgacacacgcttacggtctgcgctgtaccacagggacatgcgcgtcttccactcaccaaaacggtcaagctcttcctctgtgtagttctcttttggaacaccatccaagtaccactccggtttcggctccggtactgagcgcggcatgcctatcccaacacccatggcccgtgcttcttgcaccagttccagtatgcgcttattaatacggtacggggtttcctgtgccttattaagcgcttttttaatgccatccgcggacttaaatgcttccgctacttcacggagacgagctctgtcaatgtgcgagttatgataggtcccgcgattgtcgataggggtgaggtatccaccatcccacagagtagtgtgctgcaccggcggtaccagcataggcggcttcatggttacagtgtcagcggactctaccagtttctggaaggcctccataacgtcgtcagccggatagagcatgctcagattcccgctacagttcttccactggaacaggcccgtctcaaacaccgcggcacacagcagacgccctacggagatgttctgggcattggtccaaggctcgtgcccatagtgcacgttctcggcactggcgcggagcgtacgcaggatgtgcgtaggggacttcgtacggcgctctgtgaggtactcatacacacggtccatgtacgcaggggctacgttgcgtaactgcagagccagtagctctgactgtacgtttctgcccagtgcggacattaccgcctgtgcagtctgacggcgactggcggactcgccaggggcgacgctgaacgcctcaaacattgtgcacaggctcagagtggtcaggacgtccaaggggactaagcgcaggaaccgtcggtacttaccaccaatgcccggggctttgacatttcgcatctcatcgatagcggcagcagccacctcatatgccgaggtgagcatacgctgcgtcatcggcaggttcataatcccgccattctgcagtgcgtccgtaatcagcttacgtgcccgctcgattccgcgaatcttataggtctcttcaagctccagctggcgcttcaccagtgcttcctcgggtactacaaccgtattcagggcgctaatcataggcgcttagtctccttggttatgtccggtacttctaactactgattgcgactcacccagagattgtacatctccagatagtctttagcggagctttcgtcgccccgttctactgctttctgccacatcccgtggcaccatgcgctaggcgtcaatgcacttacctcggtgttgctcgtacagttctgagtacttgtcggacttggcaatgtcctgctccagcttatccttgttcccggcgcgcagtctgtacttgagccggttccccaggcagtatccgtagaactgctctttcgtcatactgcgtgcaatcacctcaattgcctccaggtccgggaagaactggtagtgccgaggagagttcactgagtcagaaacagcctcgctcttcgaatggaagagctggaagaactccgctcgccaagaggtcccacactcggctaaggttataagtccgtcttctgcgcacgtcactaatctgggggagtctaggtctacctgtagctgttcacagatgtccttccagataccccctacgtgactcgctttgcgcacaaccaaatcacctgcatagaatttagtggattcaatcatttaatagtctcccgtgctttgcgtcgtgcccgggccttgcgggccttgagcttctgtgcttgtgctagttcttccggcgtcttgtgcgtatagtatagcatatccgtaggttctcggtctaagtaatcggcgaccctacgtagagattcagcaatagccccagaagattgcatgctaccaacaatccagcgcccagcggcagatgccactttgccttcccctccattgcacgagcgatgaagagcaccccgaatacgcccagtaatatgacagtggtcaacgacaacagaatcaccagttacccccttgattgtgaagtccaaaggtttgccgcagaggaggcatatacctccctggtctttggcaagcttaatagccacagagcgaatctgtgctcgagttattttacgcagcgccatgaaatccctcttaacatatgatataccgtactttgagccatacccaggcgtctagctatagcgttgctaccccattcccggtccccaggaatgtgcatttgccgcagatagcgcaccgtaccttcgttcaaacgtgagcggccgctgctggaaccctttgctgatttgcttttgtgggtccctccatgcaggtgctcagggttaatgcagcgagaatttccacaggtgtgctgtactacttcgggccactctcctgtgtgttcatagtacgccttcctgtgtgcggttgtaggttggcgtttaccgtcaataagcacccacgcggataggaacccagtctttggccgcccctttctcccatggtctatacaaggtgtactcattaccatacctcaatccccccaactacatccagcatagcattgtcgtgaatgagagaatccaaatgctcaaccgttcttcgatgtgttttgggtgctcgttcacgcagcgcatccagaatagtttcaagttcatcgtgtttcccctcgtagtataactcaatcgcccgcaggctcatttccttcgcagacatcttcgccattgtctgggtgctcctgtatccactgtatatgctgtttatggtactcgtgcagcgaatgcacccagtcacgcagactgggagtagtcaacagtgacatcagatactgataggcagaatctgacggggagcgccgcaggaacaggcattctgcctctgcgagtacgtcttggttgtttcgagcgtaagccgctacgacgaattctgcggcgtcctgctctgaggtaatagggtagatagcatcaaaggccgttcgcttgccacagggcttcccatcaagcaacgtgatgcctttgacgttatctgcgtcgtcccctgctagcatctgccaccagaagaacttcaacccgtgtgctcgtacaggcatagcctgggtgtcatcccacttaatccatccgaatgggtcctccagtgcaggccacactgtacctgtcggtatatcgaaccgagccatagggctgagccaagaatccttgtcctgggacatcaggattccccggtctccgaagctgtacgaatccattacaaagaggtcgtcggcctcgaagtagtcactgctgactacctgaataccctgctcagaatactggtctgggttctcaatcaggtgccgcttcaacggtgccttgagcggtagctcctgtcgattagcgcgctgcccctgatagggcttagccgtaggcaggtgccagcgcaagcacttagcacatcctgcaggcgtcaggtacgccactgcctctgagcagccgaccaggaacatgtcctcaagcaccagctgatagaagcggcgtattgcggtatccaaacgttttactgtagcggcggctttgtacacgcaaaaatccgcatcgtacagcagaatcttcccagagttctgcggagctaactgctcgctaagctgggacaagtcaaccccgttgataatcatcagcgccccgtaatatcgcgggccttcttgtcggcccagttaacccaacgttctgcccactttgccttgctcagcttatcgccaaggtagcacagtcccgccaatggaatcagcgggagaatcaaagctacgtaaattgcgcgagatacgtacaacatacttaagcctccagttcagacagcaccagcacggtgccgagcatgtccccgattacttccggagtacgcaggctctggtctacgtcgtagatacaggagccaatctccgccaggccaacgctgagcgtgcccactacgcggataagtacaaggtcgtctcctcgtaacttatcggcatgtgccgccagatcgttgtgctcccggaaggctgtagcggccaggtccaggtccattccgtacagggccgccagctcatctagtgcgttgtagatgtcgtccagactaatattaagcaccccatacgccgctgcatcgtataccgctgagccgaccgtaatggcaaggttctcgtacgcttctaatactttatccattagtcaaatcctttcagtttgtgtttttgaatgaaggcgtaggctttggtctcagtggccgtggcctctgcgcccagggcgtatgcacggcgccgggacttggcgcactggcgattcaagtgataacgctgcgcactaatctcgggacccagaaggcttgccctgtatgcgtgagagctagctacccagcgccagtcgtctgctcgcttctgcaaacgctgtgcgcgcagaagcagaaacacagcgtactgttctttggcccatgtgattatgcgcatttatacccccaggaagttagctacttcgtcacgcttggcacgcaggttatcagcatgacaagcatgcgcttctgctacctctttgctgtgcttggaggcctctactcgcgcctcggattgagcggccagacgtactgcgtcgtctgcgaatttaactgacagctgctcgttaaactgcgctttggcatctgctcgtttagcttctgctgtgtaggctgcactcaggagtttgatgagaatgttgatgatgttcatagtcttcctctaaggccccatgcggggccatattagtttaggttagggtagattaggcttgaggtgcagcaggcgcagcgggcgctacaggagccgcaggagccactggagcagctggggctgcaggtgcttgcggtgcagcgggagccgccggtgcagaaggagcagcaggtgcctgcatagctgccggactcggaacagagccagcgttcagcataatatccagagcactgcccgggaagtctacggccttgtacatatcctcctgaatccagttcttgctcttaccgtcgtcgaaggtgccttcgatgtgtaggctgtcccaggtctctttggttgggttgttccacaggaacagcttaatctcagaggcatccagggctggcatcttgataggctcgccggtgttcgggtcgaacttcggaatcgggcggataccggacaggtccacgatgttagacttcttgcccgcagcactggtgtgctcatcaatcgggaaggtgaaggcctgccccagacgctgtgctgcatgcttaatgctattgtcgtagttgagcttgtcgaagaacttcttgaagcctgctcgctcaaagttactgatagccatcgggtacgggcggatacgcttcacttcaccgttaggaccgtacaccacaataccgatgcgcacgttagccactgcaggcttaccagtaggcttaccgcccttagttggtaggcgcttaccgatttctacgtactcggtgaagtagccgtagtattcgcccttcggaagcagtacatcctcatacgcaccgccctgtgaggtttcccgcatatctacatcttgggtttcgattgctgcgtctaccagagcgttcaaggatgccagtacattagtagtcatataatttatacctcgttagaaaagtgtttgtgatgctgagagataactgcttgccttgctaagtgggcctcttctgcggtagcgtagaatcctaggtggtattgtaccccatctgtttgtatgtaggcacgccacttaccattgcttttacgataagacactccacgataccccgaccgggaatccttccgcaatcctgcattcttcgcgtttcctgctttattggcctcccttaaattgacccaccgattatctgtacggtttctgtttacgtggtctataacgttcggccaacgtccgcacattaaggcgaaggccagtcgatgtgcaaagtattgcctacccttcacacttactaccctgtaaccatccttaatgtaacccacagcctcggaaccgtcaggcctatgcaatttccccgattcggggtcataccgcaaatattgcggcagagaagtagcgtgcatataccctctcgtttagttcaaatgatatttacgtgcagatgcaggacaggcctagcgattcttaagtgcggacttaatgcctgcagccgcggctgccgccacaccgcctgccgccaggattgccaacagcaaagctacaccgccgtagaacggaagcagcacccacagccaggaccaggcgataaccccggtcagtttcaaggttataaagataagacccagtacagaacagattcccattttcattggtacccctaattaggttttgattatgtcgccaacttttaaactcagagctgaggattcatctttataccaccgctctgtctcagatttgtgcccccagcagtcatactccagggttacacgatacacctggtattgctcatcccatacgggcgcacccactcgggtgacggttgcgtctagcaaattcatttgcttctccctacccatttcccggaatcgtcaagtaacatggggatgatttgcgggcatccatctgtaatcaccatacaccctagaatcggcttgcttcttgacaacttaccataagcaaaggccagactcttgttgtcgattaaacaaccgcagtgcgcaccaaagtacagggcagtgctgctagcggcatactgtatatctaacttcccatggaagtgtccaatcaccatggacttacgttcatgggctgcgttgagcagcaggtccccagatacttgatgttggaatcgcacaatacccagtggagtattcaaatcccaagcatcgccccaactccacccgggggccccatgctctgggaacaggatgtcccggtacttcttaatgaactgtacagggagtccatgagctttggctctgcggtagacaagagagccgtggttagagtcgcacaggagcaggttaggaaacaggttatgcagccgctccaggccaagcttggccttctctaactccaccccagcactatccaactccggactgctgtcgtgaaagctaatggcgtgcccatccgtctcatcgcctatctgcacaacaatgtctgggcagtactcgtcccgtacagtgcgcaaaaagtcgtacgcgtccggatgtgtgtacggctcgtgcaggtccccgataacgagaatacgtcgacaggtttccggtacaaacgtatccccaatgtcatccgttggggagggctggattagtttgcgggcttgcatcaaagcattattagcctttgccttgctgcccttgttatccatgaagatgctgcgccaatagcgcacaagctgacgagatacactaatgtccgtgtccacatccccgcgattatccagctcttggttgtagtactgagcagccagagcgttgtctaggtactggcccaggattgcctggtgctgctctttggtgaatagttttattaggctaacacgtgccattattgcctctcttgtgttgttcctactcgtatcacattaattctaggggaatcacagaatcaagccaaagtcaacaaataattttatttaattatttagttgaccctagcatatttccatgctaccctaaccccctacaccacccaagggtacacctatcactactcttcgataagcttgtactccccggggaagaaggtgacgccgtccccgggcctacttactaacagtccagggtaacttagttctatctcaccagtaaccgggtcgaagaatataaccgtgtgccttgtacctggggtgaagtatgctgcatacctcgggtctatcggctcaggcccaagatccatcaactccacaacactgcctgactttatactcattctaccttctccttactgtacatactcgtacccatctcagcctctgctgggaacgggacctcaccaatgataccgtagttaggccagagctggtggatacgcttaggtgcgtcctccatgcactgcttaaccagcaagctcgcctcacgtccaacctctgggttggcgctgtccaggtacagcgcatcgtgcacgttcgtaatcaggcacacctgattgtcgaaccagtcacgggccaagagtgcacgcagaaccataccggccgccaccgccatcaggaagaatgcttccccttggcaccagtagttcgccatctcggtttccttgtagtccatgaccttctgcttacgctgcccaggcacaacctccttccactgctctttctgacggaagctgtagcgggcaccagcagggctggtccacgtcccaatgcggtagattcgatagctgccgtcgtccgcctgctcccggtacatgcgaccctccgcaccggtacgctctacctcttccttaacaacagcgcggaagccaattgtttgcgggaacagcgcagcctcgttgtccaagaaagcctgtgcaaattccaccgtacatccagtagcaaacgcaatccccttagccgtagcgccatactgggctgcaaagctaggagccttaatacttgtacgcattgccttccaaagcggatgcagctcgtgcttcttgttgtggcagcgctcatatacttcttcatacggtaatccttcacggaaagctaggcggtaacagtgcatatccgtacctgcctgtagcaggcccagcagtttcttatcccctgtatgcacgcaggacataaccacttccagcgcagagtagtcaacctcagtgatgcggccgttatcaccgaatcggctggtgaatacctgcttcaccttggatttagccaccccatccccgtcctcatccgggcggggtaggttctgcaggttcgggttagaactactaaggcgcccggttacggtggcacaggtattcaggcggtggtgtatgattccggaaccatcaggacgttcagggattacgtactgcagcattcccttccgctctttgacttctccgtttgcatccagaacttcccgcaaatagtaagtaccagtgtccttctcaagcgccgccagctcgtttaccaacttacagaactcgaacccttggcgagccagtgcctccattgcgtcagtgctggtgctgtatactggcgtgccgtcatgcagggtacgcgcctgccggaactctccgcgctctgcgtacttctcccggataacttccggaagctcctggatgtccactaggcccggacagaagtaaaggtcatcctcccacttaagtttctcctcctctgtatcaaggcggaatacttttggcagccccttgttcttaccggacttgtacgtggttgcaccgggtggcgcgggcatgtcgtccacggcaacccaagtgtccccgacttgccaatagtctgccttgacatactgcggggggaaatatggaaccttcttgcggtacttgataggtccgccgtacaccagtgcagacatatggaagtccgaaccgaagttgaaatccagcgtctccggcaagtccttcgggatgtactgctgcagctcctgcttaatctccaggatgcgctgctcctgctcttcttggttcttgcgagcaatcggcatattcacgaacaggccgaaccattcgcagtacgcccaagccagcaaggcatccatgcgctcccacacgtactgcatctgattgcgctgggcgaacgtagcgcactggccgtagaagcacagggccgtgttcgggatgtccccgttaaccaggtagtcgtgcagtagcatcgggtcaatctgggaggttagcacaccctgctcccacagaagcttaaccccgtctactttgtgcgtaccaccgtacttaggagccgtctcgtccagcgacggatacatgctctgaaagtccgaggcgatgtattcagaatgcatcgtacagaatacgcgacctccccgctttaggaaggcctcaaactcggcgcgcgcaaaggttaggaaccagctaatctcatatgcggcgttgtgagccacaatcagccaacagtcagctggtattgggagccattctgatacaggtgccgcttcaaagtgcgcgcgactgttataccgtacactctctacggggcctacttctaccgtaccgtcatcgtgcgtgcggtcaatacgccacgctgattctacgatgtaattatccggacagtacggggaagcaacactaccgtaatatgggtggttttgcgtctcataatccgttatcaggatgcttctgctcattccataccctcccctttatgatattagatatgtatccttgacttgtcccgaagcgtctcgctatagatatctgggtctcaccgccagcgtatgcttctcgtatgctgtgcacgtcttctggggtaagtctggcagcagggttgcggctgcccagcaaattacgcgcacctttatttcggtcctgcatattatcgctaggagtccctagtagcaggtgctccggatttatgcaccgaggattgtcgcacgaatgccggactacaagtcccgcgatatcgctcagcttcaagttgtgggctatacagtatgctttgcggtggctgccagttgtcttcccgtcaaatctggagcggccatacccagcgccctttcctcggcaagtgcttcccctctgtccgtggtcaatacaacctgtcatttccacttagccctccgagccttgttgatagccagatgcacaatcagctggctgctgtccagtgcgaatcgtttacggaaagtacctgcagatgcagcgtacgccttgattacctcgtcgtctaggtagttgatgtctgacggtttaagcatactagtaaatctcccagcagtgatataggccctacaatatcccactctctctgattgtaacgtgccccgagttccacggtacaaaattccccggtaacgcggtgtcgcaccacgtaactaccgcgtataagtcctgtgtaatccactttttggataacccctgtatagtctacttgcataaatcctcctgtgtacctacatagcgccctcgtagaaggcgctagggaagtcacttgattggtggcggaggttcgatagcctccagcagcggctgctgcagtaggtaagtgttgtactcctgtatcgcttgtactgccaacccgcgcaggcgcagtgcttcgtttacgtcccaagcagcaccggtggatacaagagagaacgcatcagcatcaaagttgaatgtgctctccttagattcagtcagtcctatgtaggcgccgctttcacttacggcgcacacagtgtaagtcctgccaatcttcacgccagtgcggtagaatatatcacgcggcacaacggtgctgcgctttactttatcgccaactttaaacttagacattaatttggccctcatcaaatctacaacgacccggctcgaatcccacctcgaattgcaggagcgattctttaccagacagtgccatcttgttcttcggagtactgataccacggacgttttgcatgtgcggctgctcgttcctgtccaagcatcccatcataatcgccaagtccaaggcaccctgcacgccaatcttgctctgcttcatagcggtgagcggcgggaacagcatgttgtaaccttcgagtgaaagctgcatagtgcctacaatagcgcagtcgttctcgcacccaaggatacgcagctcctgccatttcgcctcaaggttctggtgctcactctccatagtgccgccacggatattcgccaccatgtcgatgatgattaccgcggggcgcatctcctccatgagcgtggatatctgcgccatcgtcaatgagtgcgcagccttaacacgaatccggtcagccctgcctactttcttgaggtaggctggcacgaactcttgcttactgtgccggtccttaatctccgccagagtccaatgcagcgccgcttgatatacccgcggcactgtgcgcgtcgccggaccctcgttaacaagccagaggatagggcggtccccgtacacttccggctgctgctgcatttgctcagcaaaatccacagcaatagcagcaagcagactagttttaccagagtccacaggagcagccactgcgatacagtccccgccacgtagacctcggatgttgctagcgagttgctcgaacacgcccagtttaagaccgccgctctcgtcagtcgcggcaagtatttcgtcaacactaccgctctcccattcaagcagcgaatcatgaacagcagcaccgtccccgtacttgcgctggaggtgcttcatttccagcaggtaatcaacttcctccccatcctgatagcgttgcgtcagcgcggctacctccccgctgtaggccagctcgttcagggtctggacaatccccaccacagaatcctgcggtacggcctgtactccccgcataagctcgtccatgattaccctctcttcccgggataagtgaccggcccggaggttgagcatgctctgcatcgcatcccactgcacttcctggtgctccgggtacgtgttccagtacaaccccacccagtctagtaggttcgacgtatccggcgcgagcatggacttgggtatctgttcacgcagtcggttccacaccttctgcgtgcacattgcacgaacaactattaggtccaattagagcctccaagttttagctttcaatacatcgtgcactgctgacacacttacaccaaggctagcagctatggccggtgtgccgtgttccctgctgtaccgcctgtaggtcttcctgatatagtccacctgctgcgctgttagcttggagtacccattctgctcccctttagaaactccacgtctagccctaccccgggcaatacagtcatggacgttatccttgaccgtacctaattctaaatgctcgggattaatacatctcgggttgtcacacttatggcgcacaactagccccgctatgctctccggagatatatcgttcgccgagcaatacacctttctatgcaggggtatcttccgccctttgaacgtggtatttccgtaaccctttggtccgcctttctgtttgtgctctttacacgcgcctaataccatctaataactcctgtattgttgcctcttttgggtccccgtcgtagtagatttcgtggcacgacataaagggacgtagcgcgcgccgtatcatggccgcgccggagtgtcccgcttggtcattatccagggacagtatcactgtcggtttgttctgtatcagccacgcccttaactgcacgggcaagcgagtacccagcatagctatagcctgcacgttcattgcagagtagttcgtaatcgcgtgctgatatttgatcgctgatagatagtcctcggtgagcacgacctttagaggtgcggccgcagctacatccggtgctacggcaggtgccgcggcagcgaatggtattggttggccgtacattacccacttcggttgctgtcgagcatgaactgcacgacccagagcagcccttccgacacggaagattatccgctgtttctctttgctccattctgcatcccccaccatttcaggcatgattccctttgtgattaggaatccgtaaataaaactctgcgtttccgcaggcgcttggctaatgcaaattgcatctgcaggtgcagagggctgcaccctcggctcttcctgtaactgtatgcgctggtactgcttgtgctccttgcccacctgcttgcagcggtggcaatagtattcccaggcatccgggttattgtagagcaccccggcggcgtccctgccgcagcaccgaaagcgagccctctgccctacggccaggcgcttgcacgctctaagccagggctggtccattacttaatttccagggtagtggcgtaagtcaagtcgggttgcctaagaatctggtgctcgttcaacagcaccggtgccccgtcatgcaggtagaacatatccccaccaggagattttatggcccagtaaatctttgcaccccaggtaaatggaactgccgttctgggggcatcaggcaaggtactatagtttatggtactaggcatttgctttctccttccgtttgatttccatagccatgcggcgcaggtcgtgtgccaactgcagggctgaatcggggtcgatgttaatcccaatctcaacctttgcccgagtgcttcccttcttaggaactaccccgatgtacattaaaccttccccatccccattatccttctcaagaactaggcgttggtcatttcccgggtcgcgcttagagttcatgtaggccgccttgtccgggactggcggcagctcatccttcgggtcttgatacagctcgaagttatcggcgtaccacgggtaggggtcggctcctccatctgtaaagttatccaactgcagccagtggccgcttgtagctatatctgtaattacgtagtaagcaaaatcccctaggtacgacttgagcgacgaattgtttttgtgtgctttgcgaacaactttatcaccaactttaaacttagacataatcaaccctccacaatattatcgtatccgccccagtcttctacgactcgggtgcctagttcaatcagttcttctttaaagccgtaatcggagaacaccattatgtactccgtcgccttctctggattctcctgcacccagctaatcagttgctgcttagaaagttgtgatacctctcggaacgctgccagtaactgcgggtcctcagcaggcggcatgtcccacggctgccgtaaactgagcgttggtgcagagagccattggtctggttctactaccctaggatcccgctcaatcggaaggtgcgagaacgtgccatcttgtagtacacgctcaagcacttgccccaggatgttcaggtccagtacctcatccggggtgtgctcgtgcatgtaccctacacctacgttggtgcactcagggatgatgccaacgaactcggctgagtcagtgtacacccccttctgtaagtgctgctccgtgcgtcccaggcgctctgctagggtcttggcaaaggtgtcagagcagcagcgcatatacctttgatgcgtaatgataccgtcgccgcggcggtcgaagctgatcatagccttgaccccagtccaaaatccagagtcatccttaaccgatgcagcgctaccctcgcagccaacctcttcgtccacgaagaagcagtagcgtccgtgcacaccccgccgcagcatctccagcatcaggtagataccagcaccgcagtccgcccccaagcagtcagcttgttgcggattctttacgaacagcacgcccttgttagtgcagccgacgtccggtgcagcgctggttgggcgcgccactgtgtcgaggtgcgacgtaaacgctacgtcactttgttcggagtccccgaccagcacgaagtagttcccgtgcttgtcctttacgtagtgcataccactacccagcgcctgcataagcagcggctcaaaccacttagtgctgccccagctaggccggtgcgtttgcagtatctgcaagagcagctgcatatcaatcccatgcggattcaagaacattaagctgcctcctctatttcttcatcgtcgttgcccagatacttctcccccaagcaatcggctgcatactcagtgagaatcaacccgtgcacagggtgttcttctgcgtgctcaataagcacctgtcggtcctgtgcatacaccagttcttcttggtcatgcactaccccctctaccgaacagtgctcaatgtctccgtcgtatacataagcgtcgtggtaatcagaccaagtgcaactccatcgattatacagaccctcgcgcccaactacgtatacaaactccccctcttcgaggcagccgtcgcagaccatttcataatcggcggtttcgtgcatatcatcaacggagtagcgccccccgcagcagcagcaccgagcagattctgtgccgacgtagatgtacccttctgattcttgcgcctcgtactcgtagtcgtcacgtattacaaaggcgtcactgccttcttcgtctacgccacgctggctgctatcgagatatggcatcagcactgcgccgttgtaggttgggtgcggtatgcgtgccagcattaccccctcgagacattcagtgtttctggtgtacccatgcccccgcaggattgcatccgcagcgttgccgtaagcacggacgtactctttggtttcaggttttacgattgctcgtgccagcacttcgaagtcgtccccgaaaagctccccggtatactggatgaataggcgcaacccgttatccggcaacccgtggctggtggtggcgtacgtccgcacagggctatgcttaaatgagtacccgctcatgcagctacccgggccattctcgtaggcgtcgtaccattcctgctcggtcttgcacaggtacgttgtagggtctacgttcatagccttgaggtcttcgacagcatcgcggaagtctaccccgtttccgtagtagttagcgagccacttaccgacgcgcatctctacgcaacggtactcattaactgcggcgaagtccttatgcatccgcggctgccccagcatcacgatgggctcaccgttgcggaaaccaaagcccaaaggcacggcgaatctagacactacgaagccgtgcaacttcatgagcagcgcagcggcgttgccatcgcggaggtggcgtccgtaatcgtagccagtgtactcctggcgctgccgctcttctggtgcaagcataatgcgctcgaataactgcacggcctgcttgtgcaccttgtaaccggtgaactcttctacactagcaactacgcgctcaaccactacatcatcgccctcatagaagtcgcggcggcgttcccagaacttgctgtcgatggtgattcgcgccggggaaaagagttcgtagaaagttccagaccggtacaggtctaccttttgcaacgggccgcgagtcatcattacttcgcggtactcagggtgcagtatcccgcctatagtcacctctaagccaggggtgtaagcgctgacagtgcggagacccataagcgcctgcagcggaccctcattgtgagggtggtcagaaccttgcatttgcaagtcctggaacggggtccagtaatcaccgctggaatacatcgaacatttcattggcagtgcgtttgcaccttccggcaacactactttccattcgataggtgctgtgccagtttctttgatagtctcttgcattttcatttgctcccgagttaattgtattgcgtcgtgtattaatagctcagcgtgcataccacgcagcgagttgtcgttgcttataatatgagcgcacagccgccctaaatcttgtataggctccacgatacccgtaccgtagtagtgctgcgaccacatcaaactcaatgtgctcttgcaactgccgcgcggcagattctgtatactcgcggtacgtggggagcaccaccgcagagtcctgcttacgaactcggaggagtctacgctcgactggtacgattttcttgagctcattaggaacctctttgaatgtttcccacggacacccgcacttgccttgtgtctccagcaagcgccagataaacgccgcggtttcgtctacagttagcataggcttctcttagtcacgcagtttcgtgccaccaacacaaaagccggagaggtgataacgtcacctgctcggtaactgctccgcattaatcccgcagaggttaaaagtatgcggcgctcattaattgccccttctaaagggatgagataatacagaccgctataggtctcccggtacacgtcatacttcatactacaccccgcacattaaaccggtaacagtagccgcgcagggtcatacccagtcgctttgcttgtttctcatagtgctgtcgcagtcccgcctttgcgctgtactcccgcgccagcccgtcgattgttggttgctgcttacgcatcagcagcgtttcaggattctttccgtaagccttcatgccgtacccccactgacacggcgcacgcacatgagcttagtgtaaggcccaaaactatcatagcggcgctctgcatacacagctactacgtcatcggaaaccttgacctcttcgcccaagtatcttgcaggcaaggacttgtactttccagtgcaatatgggtacttgatagcgccgggatttgcatccgcaatacgcaacgcctcagatttacgaatgaactttaagactttcatagccgccaacacctctcaaatttcgttgttgctcttaccatccacagtgagcgtcaccgcggcgtccgggtactgctcctgcaccgccgcaaggatacgcgcacccagctctttgcagccgccctccgggtattcgaataggtcgtactcagggcgtggctgcagttgctgtgttgctggctgctgcaattgcacagtacagtagggcaccgggttgcttgcgtcatttcccagcaccagcatagcgctggtcacaatgatgttgaatacattaaccatagagttgtctccagtcgttgataatgccaagattcacggcgtccagcacagtgcgggcagccatttcggtgtagttatccacaaattctaaaggggattcctgattagtgtctttgtcagagaatataaccacagtgtagctgtattcttcgtatatccgattgcaccacacgggccagagttcatggcccggatagaccagtattgctttcatatgaaacctcatacgccagttgcattcacatagcgccccgtaggacgctataggcttgctactaggccactgccttcaaagttgcgtccagcacagcacgtacatccacgccctgattaatgagcatactcaccaaatctgcgtcgcttacgccagtctctttggccttcttaatggcgtttttaacgcgccccagcgcttgcaagcgcactgcatcagcgtccagcgcgtcattcttcacctgctccgcttcggcagcgtacagggccatacaggagctatagaagctggcaacaataacttcgcggccctgcttgtcagcttgtttgtagtcaagacgcatagtgtccagttcgattcccagcttctcagccgacgcatagcacttcttagcgttgaactcgtacttaccggactctttgttgaacttgatgggtaatagcgtacgcagcaccatatcaaagtcagcagcgtcactgcgctgcatatccgtagcccaggaaacgttgctgctgataagaccgtggaagagcgcgctgatagtgatgttacgctttgcttccactacgtcgcccagcgctttacgaatgctacccgcagcggtgagcttgaatactttaccagttgaatgggtcataatacacctctttgattgatttactatcggttaatttcacatagcgccccgtaggacgctataggctattaaccttcaccgtagccaaccatttggcacctccctagttgcttagataattactccacatagcaccccataggatgctataggctgtaattagtgcccaaattgggagttaacagcaggccacccactaggctgtttactgccgcccttttgtttttgctttcccctcaccctgtgctcaccgctcaaccattgtttgctgggctccacagtaagcggcacgttatcggtagggttaagtgataactgcatattccgccgtaatgctaggcgttttgctttgcgcataatctcacctctcagagtacataatctagcgcagccttgttactgctacgctatgttatatgctctttgcggggtacactccgcgccttgttccctcgattcagaggagcgagctgctctcgcctcggcagtatggtttgcctcagaaccccggtgataacgtccggcacgcttactctttttaactgattatctaggctcggtcgtcatcgtaccagtcaaggtactgggcctccccgcaaatcagcttactgcttgctatctaagttactcagttaatcggaacttgtcaagcgtttatttcttactacttgctggctgtccagctcggggtattcggtagttcccaaccagcctgtttccctaaactccgatgagcatcacttcttaggggttatctcgctgttagcctctcagcgccctatcgtggttagggttccaatcgcgcatttactgttacacgacatattcagttactttgggattcaatctagcttatgttcttcgcggtgtcaactctttttatcgagtgtctaacccttcacactatctagccttaatccggcggagcctcccggctcggctccgttcagcacctcagcgcctcccggtgattgaactatagccccattgaaccaaaagaagcaagtaatattttcaactttttatcactaagagcaaaaagggtaagcagggcaaatacttagagctgcacttagaaccacactagggatagctctaggggtactctaaccactactaaccatactgcatagtactgcatagagcgtagcgtagtgacgtaaggaacgtagtgtagcgtagttaatgcttccctccctacggtcggtcatacagggcattactagtgagtactagtgagtagtagtgtatatagtgccctaaacccctcctactccggttacttcatttcataatagctttcgaatgaaagtaagagcaaagggatagcgctgggatagtggatgtgcgccctagtggggagcgcgcagcgtagcacagaatccgcgcaatgtaaagcactaaggatagccagtggatagcctagtgcatactagggatagcactagggacagcactacagcgcactagctggcccactatggccccactactggccccgctggacaggcacaaaataagcaaggcagagcacgcccctatggcccacagggagcgcacagggatagccctagcgcctcatagcacgcactgagagcgcacaggaagcgccctagtgaacgcacaaggacaggcatagggtagcactagcgatagccctagaacgcagcacaggcccgctgaggccctctggtgcgcactagcaggcccacccagtgccccccccccccctaaattgacgctaggtaccccctatgggggcaattgggcgcgttcagggtgagggaggggctcgcgtgagtctaataaatttcaggtccaggtatagacctgctcgcctagactgggcctgggctttacgctgtgcgttagaagtgcagcaccaagctagcccgagtagccccaggggtaattgccgcagccccaggattaaacagagtaactttgtaggagctgtacccactgtagctactgacaccagttagcagcccatcaacagacccgttaaataccggagaactcaaaccgacaggggcttgagtaatgccgtacgggagagtctgtacagggctagataccagcgtaccggcagcgacagcaccaggggtccacgcaaggctaaatggaacagaacgagcacgctctactgtaataccatccaggctcagtgtgtttccagtgctgttggtgaagcgcaaatctccgtcacccgttaggctgttacccaagtaaaagtctacatcgaaccaccctggaccagccggtaccgcggcaacagaggagccgccactacccaccgctaaggttatgttaccagtagcgcccgggttgtagactcgcaaggatacgcgcactatagccccgagaaggtgcagcggcaactggtaccgacgcatctcctgacccgcgggaacatccagtgctacagtactagcggctccagccctagcggtacgactagcagcagcagcgccacgcatgtacgcctgcccgataaacccagggccgaacggactatccccgcgcactacgttcatgttcccactgtacacgcgcggagggttgatgcggcaagccctagtactactcagtgaccaggatagaacactgctggcatctgcaatgttcgcatcattgtcgaaggcatctacataaccaccttcaatggtccagaattccccttcgcatccatacgccttgttatcagaaataacaatagggccaacagctccagacctaatacgaatacacccggcatacaggttatggtcggagtccgggcggaagtgcgcaaaaccattacgggtaatccaagagcgcgacagctgtccaaagtccagtacgtgctgtgcagctgtgttagccccgtatggtacactatcccactcaaacttattatccgtaatccacaccaggtccgggttactgtttgctgtactcttaatccatgcgcccgagcacagtccgaacgtgttattctgaatgtgcaggttattgacgttgttattaggaatacctatgtaatccccgaggagtataacgctgccgttagaggcacccatcctacggaataagtttccggagatgtggctctccatacagtcacgtaacaccagcgcagagcccgccaagttattaaaagcagagttttccgccccaaaatagctccaggatgttacctccaccataagtcccgaatcactgctgacagccccctgcagtcgcattctaaggaacccgccgcccattccacgggtgctcgtaccgtcaaagtagaacatcttgctggctgtgctcggtttaacgaatacagccccaagcgggttaacaccctctaggccatcacctataaacagcatagggttagtaaggtggcagtctccaacataataagaccccacaggtactcgcagcacctttacacctttagcggaaatccgctcaatagcggctgcatagttaccggaagaatccggacggagtccggtaagtaccggggcatccttcgctaagtagtcagctactctgcaccacaaatcgtcttggctgtagtaccgtgtttgtacgttctctactagtgccatgtgtcccctcttatcgtttcaattcagccagggctgtgcttacgttcttgtactggttcccgatggctttgctctgccactgcctgcgctcccataggccccagcacactttattgcgctgcccattaatatactgggagcagtcgaaggtccagcggttgctgcccttgtacacccaaccggtgccaggggacttctgctggtacttgctaatatagcgccagtccagtacagcctttccagccgctgcgtaatccaggctcttgagatgccgcttcacagcactgccgttgaagccagctacgcctacgttgtaaatgaagtccacagaccccaccagagatacgtcagagagctgcataggaagcccgtcaagggcctttgcgtgttcccctgctgactgtatcagttgcttctgacaatcgctcagcgtggctctctgacccatcttgacgccctttgtctccccatagcagatagtagggaccccggcgctatccttgtaggcggtaaggctcaggccctcgttgtgctgaaccaccccggtaatggcaccgccaagcatagtggcccccgtaagggccgcaataaccttagtccttaaactcatatttaatagtccccttacgtgcctgctcctctaggagcttgaatgtacgtctcttgtaatacgcattccacgccagggttagcaccgcgcacaccgtcgcagtgatgaagctgatagtgctccagttccagctcattaactctgccaaccaacctcctgataccgtagcgccggtaactgccgcacctgcccgggtagcgaggtctgccccaactacgtcccctaccttaatcatcctgctgctccttcttcctgaacagcttacgaatcaccagaatgaccactaggaagaccagaggaatgctggccccagctaatccggcgaggataagactgtaactatcattgttaaccacctgcaggcgctctgcctggattgtaccggtgctaatagtttgcacctgctccttactggacgtgtccaaagtgcctacgttagaatctgatacatcggttttgttggtggtgctggagtccaccttgttattcaagccaacggtttgcttggtgttttcggcaccaacctgagcagatacatccggcttagaaccaactaagccggtgagtgcagaggtcgccgagcaaccagtcagagtaaccgcgagcagtaacccagcgaccagtttacgcattagctagcagccttcactgcggctaccgcggcttctagcgcagcaatcttggtatcgaaggtagcacccgtctgggccacgtcctgcggctgcgtaagcatagcatacaggtccttaccgagaatgttcagctggcgcagcagctcctgctgttgcgctggggttgcttttgcaattgccatagtattgctccttactcaacagagattgctgtgattacaccatcttctacagtgatagttgctgctacagtagcggtagcccccgcctcccgagcggtggtgaacgtaataggtgcagttacttctgcgccgttaccaaccaccactacagcaccaccgtcagaggctcctgcagcagagagtgccgccactgctacagcccctgctgcatctacatccggacccagagtatctagtgggccggtatcatgcgccaaggttgttgctttatcaagcgccactgccgcattacgtactgcctggcgctgtgccagtgttgcttctgcaaatgccattatcttcttcctctatgttgtttacctctgccacggttctgcaacctagcagccacaccccgaaggcccttagacactttgctctgtgcccaatccagcgggttctcaatgaaggcccgagccatcttctcagactcacgctcagccaccactttctcatcttccaccaggtgcccgttcagcgtagccaccatcatagcgattgcgtctgctcggtcgtccttagctaggctaccgcggtcgtacgtgatgccggacaactgcgcgaacgcggagtacagccaacgtctatcgcgggagtatgccatacaggtactaatgtcgtcgtggatagcacgctcgtgcactaccaggcggtgccgacgagtaactgggctgattgtgtcaatgatacgacgctctttctgcgtggagttattcaggccccttacgccaataccggcgagacgccgctcccgcagacggttcaggataagcatagacacggtaccgtgccccatgttgctctccacaaccatatcctggatatctaactctacgcataggtcaatcagtttatcaatgttctcttcgctgatacctccttggaagccgcctacggagaataggtggatgtacgagttcgcagcaccaccagcagcgtaagacacttcgtccccgccacacccagccgggtccaccaccagcaccttatgctggtacggcaggtgcatgtccccgtagaatgccgggaagtacatctgctggcccataatcccctcatgctcatgctggtacaggtaccggcggtccgcgatgtaggagaacgtctcaggggaggaatcctggctaccagagtaaaccagcatatccgaaagcttgatgcgcgtacgcatttggtcggacagtgtagtgtcgagcatgtactgcagctggaagccttccggaccgaagtccagctccttctcaatcagtgcatcctcgtcatagcgtccggtgtccgtgctctcgcctagcgtcccgtcgacgccgaagccggtgcgtttatagccgcgctcaataagctccaggatataaggagcaagtgtacttccatatcgctcttccatttcaacagacggaatgcgcccgggccacacgcggacctcgaagccgcgtcccggcagggttttatagatactgtccttggtctgcggtgtgcccaggtacagcgtatccccgtgcgtacagatagctgcgaagtctttagaaatcatcagcagctgctcacgctgggtttgcgttaaaccgttcttagtggtctcgatatcatccggaatcagcaggtccgcgcgcttcccctgcagggatgcagtgatacctacacaggctacgctggcggatttatccagcggtttcaggtcgcagttgacatcatagccttcgaatgaagtacggtccccacgagtagggtcggcctttaagtagcacagtagaggccaggtttctagcatacgaatgattaagttcgctacgtcagaggcctgcttctctgcaccggacacaatcaggatacgacaggattggtcctggatgagcctccagacggcgtacagtgcagctagtgtagacttagcctcaccacgctgtgcggccaccatgcgcttcctagggcccttctgcatgtactctgcaatgtcggcctgcatgtccgtcaatgtaaaacccaggaaccgcatacctatgtatgcgaattcccggaagtcacttagcgccgcggccatcatcatcgcgatgtcctcgcgctcctctttgggaatactgcgcggattcgcactataaccagtaagtttctggttgagcatgcgcagtcttcgcgcagtcttcaccgataccattagacaattccttctagtaagtcctcagagtctgaaccaccaactttatttagaatttcttgcttacgcgcctctctacgcgccgctagttcatcatcgaactcgtcacgaaggtcctgcatctcctcggaatctgcatccgcggtgatgtcgttgtccttcaagaacttggcgataaccgatttatctgcggcggggagcggcacctcgtcttccttagactgcttgatttcttcaatcaaggcctcagtgaacatgcggtgcagctccgagaggcgactgcgtttagccgcccctgccattgtgcctccagtaattatttaagttttgataatcccagcacttctcagctccgctaacagggcgtttagctgggtggcaacgttgctggtgtcggtactatccgccacagcgtttgccgggcccttgtacgccagttcgcctactgaggccagccagttgtcaaaagctgcctgggttacatacccatcgcccgcctctacatctgcgcccagcctagccgccacgagcgtaccggccggtagcgtctccgcaaacagcaacgaatttcccactaccacaaagctgtagccggggatttggccctgcccattcagctcaactatggccttactaaaagcgatgggcggcgtcacggtgtctgtgggggtatccagtactgtaaaccaagggtagcttacagtgaccctgtcggatataaaggtctgctctagattagttactcgggtatccaggatagcgtcggcagactttctagcagcctcttccgcatccaccctttggtccagacgggcgtcgccggaatcgacgtaacccttgttagtggcgtccgcagtgtccactgggtctcctaggtgggtgattcgatatccgtgcatactgatatcgccgtagaagccctcaatagaacgcccctcaactagctcttgagccaggtgcaggaactgcgtattctgggtatctacgttgccttcaataaacggagcaccgctagagaattcaatgtaaagatactctcgttcagtcttacgaattaggagcaccactgtctctgcagacagtggcgagttcagacgaatattggtggagctggtccaagtgaaggcagtagtctcagcaccatctaagtaaacgtgaatataggacttatccaggtactcgatatcgcactggatatcctgagtacctgcaggctttaccgactcttgccagctgaacgccatattaatcgtctccgaagttattgatgatagctcgcgtaggtgcgaattcctggattagcggtacctgcttagtgaaggtcttgatatccatattaccggtagccaggtcctgtacggccccgagcagccctgtgacgtaacccatagatgccaacgagtgacgaggagaatctcccaggaaaatatcctgcagtaaggataccccgccgatggcactcatacccgttacggattcactgatgagtttctgggtgtctacatcctttccgtccatgccatgcttggccatagtagccagcagcatcaacgggaactggtacgccataatgtgggccacaccaatccacccagcatcgttcagctctctacgcagaatcttgttagtggcagccagtgcgaagctctggtaccctacaatgactttgccgataggattgaactgcgcaaagtgcgaggtctcgccggtacgaatctgctgtaccaggtagtccatcatacgcgtccctacaacctcaacttgcatctgcaggtccggctggaacatggcgcccgggttagccttgttggcagcgatagcgcggtccgcaacgtcacgggtaagcccgaaacgctccagacgcttaaacgcctcagcatcgcccttgaacatctgcgtaagctcatccgccacaatgccggagttcaggttaacctgcagccggtgcaccatactcattccgttgacgtgacgtgcagcctgcccaacgttctgagtgacgttgaaccaggaggcctgacgggtcaggtccaggttatcgtcggcgtacgtattcaaccagcggaagcgcatctccttctggatattaccacgcagcacagtgtctagacgggcagccatatccggagtcttgatagctacggcaccttccttgaaccaaggctggtcacgcatactgcgcagcactctagccataccgaactccttcatggccaaagcagtatcagtcagctgatataggccggagttcttaagcatggtggcgttagccatgttcccggctgcacgcagcaaatccggaagctgtccagcgtcagcaggtgccccacccaggataaagtcgatggtgtcattgacggtcttctcccacttagcggaatccgctagcgcgtgcttagactcatcaatcatcttagcgagctgtcccaggtcctgtacgcctgcataggccatgcctacacgcccagacatacggttagtgtacccgtgcataaccttggctacatcagtatccatcaggtcctgcatgcgcatgctcttaccgttcaccagatactctttgtccatgttgaaccgagtacgctgacgcagattccgcgcaggggatgtgctaccggattcgcgtacgttaccagccaggaaactctggattgcagactcatctacaccagcgctacgcatagccataacgacctcgtcgttacccataccgttaatcagctgcttccacatagggccagactgcccggcgcggccattatagataccgtcaaccatctccttggcaacacgctgcactacctctgactccatgctcgggtacacgtcccgcagggcggaccggaacagggcgcggtagtcgtccagagtgttaccctgtgcg

SEQ ID NO: 43 - DNA, 43776 bp, Unknown
  source: /note="Description of Unknown: KP2M-P0203 Bacteriophage sequence"
ggaagcgccctagtgaacgcacaaggacaggcatagggtagcactagcgatagccctagaacgcagcacaggcccgctgaggccctctggtgcgcactagcaggcccacccagtgcccccccccccctaaattgacgctaggtaccccctatgggggcaattgggcgcgttcagggtgagggaggggctcgcgtgagtctaataaatttcaggtccaggtatagacctgctcgcctagactgggcctgggctttacgctgtgcgttagaagtgcagcaccaagctagcccgagtagccccaggggtaattgccgcagccccaggattaaacagagtaactttgtaggagctgtacccactgtagctactgacaccagttagcagcccatcaacagacccgttaaataccggagaactcaaaccgacaggggcttgagtaatgccgtacgggagagtctgtacagggctagataccagcgtaccggcagcgacagcaccaggggtccacgcaaggctaaatggaacagaacgagcacgctctactgtaataccatccaggctcagtgtgtttccagtgctgttggtgaagcgcaaatctccgtcacccgttaggctgttacccaagtaaaagtctacatcgaaccaccctggaccagccggtaccgcggcaacagaggagccgccactacccaccgctaaggttatgttaccagtagcgcccgggttgtagactcgcaaggatacgcgcactatagccccgagaaggtgcagcggcaactggtaccgacgcatctcctgacccgcgggaacatccagtgctacagtactagcggctccagccctagcggtacgactagcagcagcagcgccacgcatgtacgcctgcccgataaacccagggccgaacggactatccccgcgcactacgttcatgttcccactgtacacgcgcggagggttgatgcggcaagccctagtactactcagtgaccaggatagaacactgctggcatctgcaatgttcgcatcattgtcgaaggcatctacataaccaccttcaatggtccagaattccccttcgcatccatacgccttgttatcagaaataacaatagggccaacagctccagacctaatacgaatacacccggcatacaggttatggtcggagtccgggcggaagtgcgcaaaaccattacgggtaatccaagagcgcgacagctgtccaaagtccagtacgtgctgtgcagctgtgttagccccgtatggtacactatcccactcaaacttattatccgtaatccacaccaggtccgggttactgtttgctgtactcttaatccatgcgcccgagcacagtccgaacgtgttattctgaatgtgcaggttattgacgttgttattaggaatacctatgtaatccccgaggagtataacgctgccgttagaggcacccatcctacggaataagtttccggagatgtggctctccatacagtcacgtaacaccagcgcagagcccgccaagttattaaaagcagagttttccgccccaaaatagctccaggatgttacctccaccataagtcccgaatcactgctgacagccccctgcagtcgcattctaaggaacccgccgcccattccacgggtgctcgtaccgtcaaagtagaacatcttgctggctgtgctcggtttaacgaatacagccccaagcgggttaacaccctctaggccatcacctataaacagcatagggttagtaaggtggcagtctccaacataataagaccccacaggtactcgcagcacctttacacctttagcggaaatccgctcaatagcggctgcatagttaccggaagaatccggacggagtccggtaagtaccggggcatccttcgctaagtagtcagctactctgcaccacaaatcgtcttggctgtagtaccgtgtttgtacgttctctactagtgccatgtgtcccctcttatcgtttcaattcagccagggctgtgcttacgttcttgtactggttcccgatggctttgctctgccactgcctgcgctcccataggccccagcacactttattgcgctgcccattaatatactgggagcagtcgaaggtccagcggttgctgcccttgtacacccaaccggtgccaggggacttctgctggtacttgctaatatagcgccagtccagtacagcctttccagccgctgcgtaatccaggctcttgagatgccgcttcacagcactgccgttgaagccagctacgcctacgttgtaaatgaagtccacagaccccaccagagatacgtcagagagctgcataggaagcccgtcaagggcctttgcgtgttcccctgctgactgtatcagttgcttctgacaatcgctcagcgtggctctctgacccatcttgacgccctttgtctccccatagcagatagtagggaccccggcgctatccttgtaggcggtaaggctcaggccctcgttgtgctgaaccaccccggtaatggcaccgccaagcatagtggcccccgtaagggccgcaataaccttagtccttaaactcatatttaatagtccccttacgtgcctgctcctctaggagcttgaatgtacgtctcttgtaatacgcattccacgccagggttagcaccgcgcacaccgtcgcagtgatgaagctgatagtgctccagttccagctcattaactctgccaaccaacctcctgataccgtagcgccggtaactgccgcacctgcccgggtagcgaggtctgccccaactacgtcccctaccttaatcatcctgctgctccttcttcctgaacagcttacgaatcaccagaatgaccactaggaagaccagaggaatgctggccccagctaatccggcgaggataagactgtaactatcattgttaaccacctgcaggcgctctgcctggattgtaccggtgctaatagtttgcacctgctccttactggacgtgtccaaagtgcctacgttagaatctgatacatcggttttgttggtggtgctggagtccaccttgttattcaagccaacggtttgcttggtgttttcggcaccaacctgagcagatacatccggcttagaaccaactaagccggtgagtgcagaggtcgccgagcaaccagtcagagtaaccgcgagcagtaacccagcgaccagtttacgcattagctagcagccttcactgcggctaccgcggcttctagcgcagcaatcttggtatcgaaggtagcacccgtctgggccacgtcctgcggctgcgtaagcatagcatacaggtccttaccgagaatgttcagctggcgcagcagctcctgctgttgcgctggggttgcttttgcaattgccatagtattgctccttactcaacagagattgctgtgattacaccatcttctacagtgatagttgctgctacagtagcggtagcccccgcctcccgagcggtggtgaacgtaataggtgcagttacttctgcgccgttaccaaccaccactacagcaccaccgtcagaggctcctgcagcagagagtgccgccactgctacagcccctgctgcatctacatccggacccagagtatctagtgggccggtatcatgcgccaaggttgttgctttatcaagcgccactgccgcattacgtactgcctggcgctgtgccagtgttgcttctgcaaatgccattatcttcttcctctatgttgtttacctctgccacggttctgcaacctagcagccacaccccgaaggcccttagacactttgctctgtgcccaatccagcgggttctcaatgaaggcccgagccatcttctcagactcacgctcagccaccactttctcatcttccaccaggtgcccgttcagcgtagccaccatcatagcgattgcgtctgctcggtcgtccttagctaggctaccgcggtcgtacgtgatgccggacaactgcgcgaacgcggagtacagccaacgtctatcgcgggagtatgccatacaggtactaatgtcgtcgtggatagcacgctcgtgcactaccaggcggtgccgacgagtaactgggctgattgtgtcaatgatacgacgctctttctgcgtggagttattcaggccccttacgccaataccggcgagacgccgctcccgcagacggttcaggataagcatagacacggtaccgtgccccatgttgctctccacaaccatatcctggatatctaactctacgcataggtcaatcagtttatcaatgttctcttcgctgatacctccttggaagccgcctacggagaataggtggatgtacgagttcgcagcaccaccagcagcgtaagacacttcgtccccgccacacccagccgggtccaccaccagcaccttatgctggtacggcaggtgcatgtccccgtagaatgccgggaagtacatctgctggcccataatcccctcatgctcatgctggtacaggtaccggcggtccgcgatgtaggagaacgtctcaggggaggaatcctggctaccagagtaaaccagcatatccgaaagcttgatgcgcgtacgcatttggtcggacagtgtagtgtcgagcatgtactgcagctggaagccttccggaccgaagtccagctccttctcaatcagtgcatcctcgtcatagcgtccggtgtccgtgctctcgcctagcgtcccgtcgacgccgaagccggtgcgtttatagccgcgctcaataagctccaggatataaggagcaagtgtacttccatatcgctcttccatttcaacagacggaatgcgcccgggccacacgcggacctcgaagccgcgtcccggcagggttttatagatactgtccttggtctgcggtgtgcccaggtacagcgtatccccgtgcgtacagatagctgcgaagtctttagaaatcatcagcagctgctcacgctgggtttgcgttaaaccgttcttagtggtctcgatatcatccggaatcagcaggtccgcgcgcttcccctgcagggatgcagtgatacctacacaggctacgctggcggatttatccagcggtttcaggtcgcagttgacatcatagccttcgaatgaagtacggtccccacgagtagggtcggcctttaagtagcacagtagaggccaggtttctagcatacgaatgattaagttcgctacgtcagaggcctgcttctctgcaccggacacaatcaggatacgacaggattggtcctggatgagcctccagacggcgtacagtgcagctagtgtagacttagcctcaccacgctgtgcggccaccatgcgcttcctagggcccttctgcatgtactctgcaatgtcggcctgcatgtccgtcaatgtaaaacccaggaaccgcatacctatgtatgcgaattcccggaagtcacttagcgccgcggccatcatcatcgcgatgtcctcgcgctcctctttgggaatactgcgcggattcgcactataaccagtaagtttctggttgagcatgcgcagtcttcgcgcagtcttcaccgataccattagacaattccttctagtaagtcctcagagtctgaaccaccaactttatttagaatttcttgcttacgcgcctctctacgcgccgctagttcatcatcgaactcgtcacgaaggtcctgcatctcctcggaatctgcatccgcggtgatgtcgttgtccttcaagaacttggcgataaccgatttatctgcggcggggagcggcacctcgtcttccttagactgcttgatttcttcaatcaaggcctcagtgaacatgcggtgcagctccgagaggcgactgcgtttagccgcccctgccattgtgcctccagtaattatttaagttttgataatcccagcacttctcagctccgctaacagggcgtttagctgggtggcaacgttgctggtgtcggtactatccgccacagcgtttgccgggcccttgtacgccagttcgcctactgaggccagccagttgtcaaaagctgcctgggttacatacccatcgcccgcctctacatctgcgcccagcctagccgccacgagcgtaccggccggtagcgtctccgcaaacagcaacgaatttcccactaccacaaagctgtagccggggatttggccctgcccattcagctcaactatggccttactaaaagcgatgggcggcgtcacggtgtctgtgggggtatccagtactgtaaaccaagggtagcttacagtgaccctgtcggatataaaggtctgctctagattagttactcgggtatccaggatagcgtcggcagactttctagcagcctcttccgcatccaccctttggtccagacgggcgtcgccggaatcgacgtaacccttgttagtggcgtccgcagtgtccactgggtctcctaggtgggtgattcgatatccgtgcatactgatatcgccgtagaagccctcaatagaacgcccctcaactagctcttgagccaggtgcaggaactgcgtattctgggtatctacgttgccttcaataaacggagcaccgctagagaattcaatgtaaagatactctcgttcagtcttacgaattaggagcaccactgtctctgcagacagtggcgagttcagacgaatattggtggagctggtccaagtgaaggcagtagtctcagcaccatctaagtaaacgtgaatataggacttatccaggtactcgatatcgcactggatatcctgagtacctgcaggctttaccgactcttgccagctgaacgccatattaatcgtctccgaagttattgatgatagctcgcgtaggtgcgaattcctggattagcggtacctgcttagtgaaggtcttgatatccatattaccggtagccaggtcctgtacggccccgagcagccctgtgacgtaacccatagatgccaacgagtgacgaggagaatctcccaggaaaatatcctgcagtaaggataccccgccgatggcactcatacccgttacggattcactgatgagtttctgggtgtctacatcctttccgtccatgccatgcttggccatagtagccagcagcatcaacgggaactggtacgccataatgtgggccacaccaatccacccagcatcgttcagctctctacgcagaatcttgttagtggcagccagtgcgaagctctggtaccctacaatgactttgccgataggattgaactgcgcaaagtgcgaggtctcgccggtacgaatctgctgtaccaggtagtccatcatacgcgtccctacaacctcaacttgcatctgcaggtccggctggaacatggcgcccgggttagccttgttggcagcgatagcgcggtccgcaacgtcacgggtaagcccgaaacgctccagacgcttaaacgcctcagcatcgcccttgaacatctgcgtaagctcatccgccacaatgccggagttcaggttaacctgcagccggtgcaccatactcattccgttgacgtgacgtgcagcctgcccaacgttctgagtgacgttgaaccaggaggcctgacgggtcaggtccaggttatcgtcggcgtacgtattcaaccagcggaagcgcatctccttctggatattaccacgcagcacagtgtctagacgggcagccatatccggagtcttgatagctacggcaccttccttgaaccaaggctggtcacgcatactgcgcagcactctagccataccgaactccttcatggccaaagcagtatcagtcagctgatataggccggagttcttaagcatggtggcgttagccatgttcccggctgcacgcagcaaatccggaagctgtccagcgtcagcaggtgccccacccaggataaagtcgatggtgtcattgacggtcttctcccacttagcggaatccgctagcgcgtgcttagactcatcaatcatcttagcgagctgtcccaggtcctgtacgcctgcataggccatgcctacacgcccagacatacggttagtgtacccgtgcataaccttggctacatcagtatccatcaggtcctgcatgcgcatgctcttaccgttcaccagatactctttgtccatgttgaaccgagtacgctgacgcagattccgcgcaggggatgtgctaccggattcgcgtacgttaccagccaggaaactctggattgcagactcatctacaccagcgctacgcatagccataacgacctcgtcgttacccataccgttaatcagctgcttccacatagggccagactgcccggcgcggccattatagataccgtcaaccatctccttggcaacacgctgcactacctctgactccatgctcgggtacacgtcccgcagggcggaccggaacagggcgcggtagtcgtccagagtgttaccctgtgcgataccttgacgcatcttgtcatagctgtactgacgcgggaagtagtagtcggatttaaccaacgcaccatcatccactagacctgcattgagcatatgctcgtgccacttgctagcccagccagagcggcgataggcgtcaaccagtggagcaatctctgcatccggcaccggcacagcgcggccatttacatcagcactgtaggcagcatccaggtacttgctcaggcggtcttccagtgcagcccgctcagcgcggaacttgctccgatggaagaagcgctcagagaaacctacacccttatccttcaacgcacccaggatagcgtcttccactacgctggcgctggcgtccatctccaaagtaaggttgcgtttgaagtccactacggacgggcgacgaccccctacggcggacgcatccgacactagcagcttagccaagtcttcgttgccttgggcgatgttatcgtacagggcaaacatagtggagagcttcttcttagcgccgtccagcatagcttgggcacccttagcctcgttgagggtagtgctgcccgccaggtcctggaaggcttcgctacggaagctctgggcttggtctgcgtagtccttagctgtccacttaacggcgtcctcatacgcatccaggacgtcctccaaggcagagcctttggccttgatgcccagggcgttcatgatgtactcacccagttggcggagcatgctcttaccggttggggatttcgtccgcgccagatgctcaacccactcagggctgtcgcctaagcctgccagcatctcgtgcacattgcttgcgtaataccgcatacgcggcgtcaaggtggagtctgctgcaataacagcgcgcacttcctccaggcgcttagcaatctcgggattactgtcaacggcgcgtgcagtggcggcatgaatcagttcgtgcacggctaccttgctggtgtctgcatccatagcgcgcagtgcgtccccggctgtagtccaggtgctgccattagctcgcttaggtgcgcgtagagatacctccccgcgcctagctaaatcttgttgtgcgtaagtgtagcggctgcggtttgcggagcctgctaccagtttaaaatcaatgtcgtttacagcatcacccagcgtgtccagaatagccttctggcctgctgtcaagtgttcagacttcttcaagaactgaactacgtgctgtgctttcatgttcacggaggcggtattgtttctcgatactaggatgctttcatccagtgtcttagtgagaatttcctctccctctcctactccggtaacattagcatccctcgctgtacgagttgtaggcgcttctgggtcgaacataggctcacgcccagtacgagccttagcggcagctttagcagccctagacatatcccagagctggtctaacccagctacgcccgctatcagtgcagttaccgcggcggactggcccagttggtcctgtgcatagaatgcagtacctacatcagcagcgcgtatggcggtacgtgcagctaagcccgcgcggccagcaataccggcggcaggcatcggggccagtatgaacggggagtcgcctaccaacatacccgcgaacccagccactgtgttgtcagccattaagcggtcacggtcacgctgctcaagcatctgctgcatgcggtagttataatcttcgaccgacaccgagtcgtgtaggtactcaatctcttcctgatttggggcgtacagcttagctcgggtgtcgctactcagggtctgcttggcattaaagttcaggtctcggtcaaatgccggagcagaggccttacgtatagccgcagcgatgatgctgttacccatacccgatgcaaagctctctgcggctgtagtagctggggtcttggcctgcgccagtaaggaggcacgctccagcgcgttcaggccgttatctccagcatcattccaatctacgcgctcaggcgcaggtttaattgttgcgcccttagcagaatccttttcctgtggattcggttctcggttcagaaactgagccataatatctcctaaaagaattttgataaggggaggccccgaagggcctctggttagtgcgttgcttcaaagagccaatcacgtaggttttgttccaggtacttcttacgctcaggttgggcctgcttgtacgcagcggtattccgcagcgcttgccaagccctaccctgggcctcagatacagggtactgatacgcccccaccggggacttagcagccttgcgcacctgtgccatcgcctctgctacggggccagagctaccgttaccgccgtgatagttcaggtccaccatgacctttaacgcctcgtcggaggcagtcaaaccctgtcccttgagttgcttctgcacgttcggtatgtactgcttctccagtgaggatttgaggatactgacaccgtcgtcaatggtcactttctgtgggacgggcatgcccgagttaacgtgcagaccgaaacctacactacccttgcctttgcctccccggaacccttcgaacttcatagtggtagcgagaatgtcgctaaacagcgacggctccagccctaccgagttacggccgttgacctgtacgctgacagcacgcccgttgtcgtggtcgtagaaggtggcgggacgcactcctacttgctcactgccaatcttcatatctccagccagtgccgaatcgtacgcagcctgcgcagtcgtctgaacgtctcgaaggttcacagacatcgtctggaaggtgcccttcttgtcgaacacggttacggtcatgttctgacctgcgttgcccgcagtggcggcctgcactactacacgctctatgttgctgtggtctgacatatactgaacctggttctgtatatgctgctgcagggaggccttgaattgctcttggtcgcccttataatcacccatgatagattgcacagaggtgcccgcgggcagatacacatgcctaggtgccccagcaatgtccagctctaacttacgggattggatattgccttttagcatcgtattgatgtcgtcagcgtccttccctacaagggattccgggttgtgattatacatataacggtactcctcttccatagcagcgcgagcttcctggcgctgggcatctgcatccccgaagaagctaaaccagttggccgtgccacttgggtccaccatcttgtccgtggggttactctggatattgctgtagcgcccactggccttattgcgtgcctggcggcgaaggtcgtccaagatagtgttactggcattatttgggttttgtgtaacagctttctgcaccactccacgccactcagatgggacctcagacagcagcgccatcttccctaagtccgtactggtgctataagcctgtgcccataagttgatgctatttacgttctcgcgggaaacctcaccatcctcaccgagctggtccagcgtagtcagcgtacgtgccatatccgaagacatacgcttgtgcgcttcgttgactgcccacgcatccttgctgttgctcccgtatgccagcagctgcaggttcccttccggggtgtccggaaagcttttgagcagctcgttgcgcgccttacccaggtcgcccttgtacatccccgccagggtggagcttggcatgtttccagtaattgctgtgcgcaatgcctgggtgtccgctgccttctcgcgaatggtctgggccttgttccagaactccatgctggccccagcgctgagcaccccattggttgactgctcaatgattcgaccacggatacgctgcatagtctgctcttgctgctcaggagtctgcccttcaagagactggattgcatcggagatttcgaaacgggcttgggtctcaatctgagcacctgcgcgcttgaactcctgatacagtgccgcgttgacgtccactgagttaaccccgagttccttggtagctaactcttgcagctggtttattaccatcgggtcctgcgtctgctgcgccacgctgaccagatactgcttggcccggtccagcttcttgctcttatccaagtgctcagcagccagtatgctatctaaaccggtcttgatagacatctgcgcagcggcaccctgtcccgcctgcaggcgctgatagaactcatcactggacgagctaaggccgcggtcgagtgcacggtcagcctgcgccagggcaaacgcagctctacctttctggaaggctgtgtagttcgccatgctggtagcacggagctgctgcagtatattcgtggcagactgtttggacatgtccgggagatacatcccgagcttgtctgccattgactgtacgtgctcttgctcctgctgctggaattcctcgtcagtcagaccagactcagcagctttcttagctcgtgcgatgctatctgtgcgccacttggctagagagtcgtacgcggcggcggatacgtagccatcctgataggcctcacgtacgaagatgttctgcttctgtacagcctcatctttggaagccattgcatctactgcgccctgggcatccattgcgccgcgcaccgttgcggctgcagcgttttcttttactgcttcgtcaaaccctacgccgaagtcctgcacgaaccctgacagggcagctaggcgttttgctttggaggtatcaacagacacctcacttaccgttgacggtaagctaacatcgttggactgcagttgcactcctccgatacttaacccctgtctactgggttgaatcacaggcatttgacattcctcttaagttaccaggtatgaactgagctgttacctttgctcccccataaatcataggaggacgccatgttctgagtagctgctgcaccacttccgggtgttgagctaccagagtcagtagacgacgcagcgttaccagcgtactgcccaacggcagatgccccgacactcaacaacgagttaaacatgttatcgtaggggtcctccatgtccatgttagccaggccgctgtccacggccttgtccgtcattagacggaaaccctcttcctgagttgcctgctggtcacgcacgctggcctcttgtcgtccggctacagtgttcactgtggctacggcgtctttaacagaggcccccatagtaccggaagctgctgcctgcagccctacttggctctgtgcctgcagcttctgctgctggatgttaaacagagatacctcagtccggtccctggactgggctcgctgtagcgcgatgtcgtttagctgtttggctgtctgttgaatcacagccttgttcctggccttggacacttcaatctgagcaccatgccccagaacggtcttagcggccatggccgcaaccatccaccacatattaaattctccgtctgcgttggttgtagcgcaggatgtacgagatatccagcacattcagttccatagaaccctcagtaaataatgacacctcggttgtgtctgcgttagtacggcatggcacggtaatcgtagccaggtccatacgcaggacctgcccgagcgtcagctcttttgagttcatcaggatacctgtcagttccccgccccagttgacatcccgtggggtgtctagtacctgcacatagaagtgcccagagttacgtaccgccacatccaggcgcagcaggcgcacgtgcccactccccacgagcttgtcattctggtcccgcagaataggtgtagttagcgtgaacgtactgcggtaacgcctcccgattacgtaggtgccatcaggtacaccgcgtacaacccgcagggtgttctccccggcaatctcctttatgccaacctcagtaggtcccatagggttactgggcaagtaagttaggataagctcttcctcatagcggtcagcccacccaactggacgcagtactgccggaacggtgaataccccgtcctgtacttgaacttgcttctgcaaatccgagtacgcttcgcgatactccgaacccagctggtaaccttcacgcgggtccatagacacaatcaaaagcttgttgctgggactgggcccttgcatgtacaagaacacttcatcctccagcgcttgtacgctcaggattggatacgggaacgaccacttatgccacgccgcctgcatcttagcgccgtcacttccgccccacatgaactcgtagaccagcaagctactacgctccccagacatgcgcgagaaggccatattggtgacactggagttttgcatctgcaataccctgcctggggtataccgcggtaagtgcaccgtagaatcctgtgtagtatactgcgatgaagtatacggcgatgggatcaactcaagaatacccgcgtagctgtcgttgcgcttgttcgggtaaattactgtctgccctgccatgaccggagtaacgcgactatcgcactcataggtgctggtaatgctaatacttgcgttagtgggggtgagcactgctgaacccggcacaacggcctgcatgctgttagcaaacaggaccaggtccctgttaaactgtacagcggtacggtacacagaatcctgcgcagacgcagagctaatactgatacggtccgtatccagcagtgacgtcacagtagagcggtagaagcgctgatacaggcccgaggcggacatatccacagagctgccgctaagcagaaccaggcgaccctggaaagctgcaatgccagtaatgtagccattctcgacgaaccccggattaccgttgttatcgtcgttgcctgctaagcgcccttcccaatcccgcgcaataatattgtcatccgcggcaagttctctgggcatgttcgtaatcttggtgatgctgccgtacgcccccacctcagaccaggtgcgggtgctgtagctgaactgataccacgctgtctcagacgaggctgtacctacacggcacattgctccgtcagcttgcgctgggagctgtgcaggcaggtcctgctcctgatctacacgggactggttggataccccagcgtaagtatcaccggcgtcagaggacaccacgcagttgctcagtccatagaagaacaggtacgcaccgcgtacgctcacgttcccggcgggcatgccattagctacaagagagtcccgcagctgctgagcaacgtaggcacctgatacctcctcagcgttaccgctggtgctgccagcagctggggcggtgtagtcccctgagtagtctacccctgcggaggtaactgtgacgttccagcgtttctggaatgctgcagacttaacgtagaagaaccccgtggtgctggggtcgatacgcccagtattgtccacggttgtgctaggagccatctccgtattcaggatataagtcagtccggcaatgcttgcggtctgcaaagaggtctggcctacggtggtaacgaagtacgggtcgttgccggaattaaggatggtctttccattcttagccagcaaccaccagttaccgttgctggtgttaatcagcaggtgcctaccgtcagtgccacgctcgacgtattcagtgaacagggagtcaagcccagggttatcgattgtgctttcccatacaatctcacccggcggtctacggcggataccggaaaccgggtcgctgagcatattcagctgcgcccccagttgtcctggttggcgctctctcggaacctgctgggaaacgccctgcagcaagctctgaatagtaccttctaatgattgcgccataacctctccttagaccataaaacgagcgcggcggattctgcgtgcaaaacgggtcttgctggtgctgaacttctgattgcgcagatgctcgcgcagcaccatgctcttgtaccgctcagcttcctgtgcgtaattagcgtagttgctgtcaccgcccaggtcatttaagtatacctgcgcagtggtgtagttagccacccacatagcggcgtgctccggcaggtcctcaaaggccaaatccagtaccacacgaatacgcacaggcgcatcgaagtattggttctgctctaccaggtcgtataggttcccgtcacgtaccccgtacttggattctgagcaggcgtcatatacagccagctggttccacggcaccttaatcaggccgtcggtggtgggcgtaacttcacgctcgaccacgttaaaccagaatcctgtgctgagcaacccacgacggttacgtgcaagtgcagagcgagctaatccagcgctagggttactagtgttgatgtccataacgcgggactcccccagggcttccagcgtcaggttcacagcgtctaattctctcatatttgttcctctattaaagaccccttggacctttaagacagggacaaaaaaaaaaaagcccctggcacccgaaggcaccaggggcgcgtattactcttccgcagtatcagcggctgcatcagccgccttacgggttttcttggtagccttgcggccagactcgaccgaggccacctggatgttcttcgctacatcggtggcggccttaaccgcctcccgctgagctgcattggcctggagagtctccagaccgaacgtagcgattactgccattgaacctccaattaggacttggtggtgaaggtgaacttagtcactgcagcggtgtccggacgacgcaggcctatgttgtacatcgcgtagcagtccagtacgttgctgaactcgcgcgtatcgtcccagatacgggaggtgaacggcttagcttcaacagtcaccagggtcttggacttgctgaaagtcaccatacggcacagcgcgtcgtctgcggtgacagtgtaagcagagcccagcggatgcgtaccagcctcggtcgggaactcggtgcactctactacaggtacgccgttcatcttcactacacgacggtctttgtaaccgtcgttgttggacggaccgaattcgatgttcaggagcttcggatgctccagcagacgcgaataggtatcgacatccaccagagtgaccatatccgccagcggggtcttgcgcttgatgagctcatcaataccagccttgtgcgccaggttgatgttcatggcgttagcctccatctcagcctgggtcagctgcgtggcggtagtggtacccggaaccaggatagctgcgcctacctctataccgtcgttgaacgccggtttcaggtgcgccggagcaacccaggaacggcccttgatgagctgaatcaggtgcgcctggtcgaaggtctctgcgaactcagagccgttgttctggcccatctcggttaggaagtccggaccggtccagtcatcctggtagtcaatcgggttacggatatacagcaccgtatccaccacgataatcatcttatcgttacgaaccggggtgctatccagcgcctcgccggagcgacgacccttcaccgaggaggtgttcaagcggtcaatacggtaggtgttagaaccgctgatagagcgctggctggagagtcccaggaatagagcctggtactggaagcgggtatccacttcgttctgatacacttccaggtgaatgtctacgtcagacgccgcgccgccccagtgcggacgagtcaggttgccattataaatagtgttagccatgccttagtttcctttataaataaaattaaagacctacgcgcttaccagcctcacggcgtgcgagcaaatcattataacgttgactgaactgcggagatgccaagctacggttgcccgcttcctgacggagtttggtatattctgcacggaagtccgcagcagataatgcgttgttgctggctacgccccgtaccattgggttctgtgtcttgataagacccatatcccggcagaagcccgctaccaactcagcggcctgcttaagctcaccagcgttagcgagtacacgagctgcgttacgcagaggttcaggagccttggaattaaacagctgtgctgctacctcccagttctccttcccgcccacaatatcgtaagcttcctgcactgccttggtggcttgtccaacctggtcttccaggtacgccttagccaacagctctgcgtaagcagcgtgctcgccgaaacgttccttaatgaaggccgtatcgattaggttagggtcctgatactccagggccttaccaagtgcccgcaccatatcagagtcagttaacccagatacttgcttcaacatagctaccccggcgtcaatcgtcggattgcctgtctgagccagctcctggggctgctccttagcgctatcgccacccttatccagggctgcttttagggcttcgatatccagaggaatcttagcaggttcaggggaatctttgccctgttgctgctgggtaggtgcgggcgcatcctgcacgccttgattgttcggggcgttaaggggagcacctaggcccggaatcttagggccgccttggttctctacctgtgtagtttctacgttctgaccgttttctacgttatccatctatgcccctgttgttaacttggtaataagcccagctgcttacctgctactgttgggtctgctgctgtcaagccctggagttggtcctgtgctgcacctgcggatacatcggcagacgcatcttgaacttcttgcttctgttgcagctgctcttctgtgtacatgaacggctcgctgacgataccgtaggcgtcgaagtaccagtctacgcacgcatccttgttgaagcgtggagtaatctgctccagcaccgggatagccagttgcatggactgcgctgcctctagcagcttatccgctgctgcggctttagccagtgcagaggtacccaccgtaacgttgatgctcactacaccttcgctgaggtacagcttaaagcgaggatataccagtgcagtgtacaggtacgccagcttacgcagccatgtgtcgctcagaatactgaacccgccacccatagcggcttccgcctctttggcattctggcgaatctcgtaagccgtgacgcgctcaccttgccgggagttaccggtgtacataaacgcacgcgacagtttctgttcgagcatctgaatgttgctggcaatccactgaatcttctgggcagagccaccctcgtaagcagtgacgggggatttgctgttcccgttggaaccgccgccgcccacctgcacagcctcgccagtctccgacgttgcgaactcgtccacgtctaacccagagcttgcgtcaatcagcgggattaacctcgcagactcaacctcgtagttagtcaacgcttccgacagtaccgataatctggcgaagtccccggcgtagtcctctaccaagccgcgcccgtagtgttcgccgctaacaaggttccacaccagcacgttgtagggaagctccagctccggataggtgctgctgtctccaatgcggtgcccgtctgcttcttggtacacctcgtagcttactacctctgcaccgtcctctgtccgcttaactttgcgacaagcggcagtgtagatatcaacgtcgccgtatgggtctttgtcacggtagaaggtgttccggaaactctctggcaggtcctggacgcttgcgcgctctctgataatgagtcgcaggacgttaccgcttccatcccttcgaacggtaaagttacggactgaatagacgatggatttacctgtccgctcatcaatatactccaacgcgttacctgtaaccagcagcagcttcacagcctgcaacttcgcagcataaccgtctttctcaaatactttctgtgacgccgtgttctcgacctcggccaacttagattctgccgtagcagcactgcccagcgaactaatgaactcgtccaggtccgaactcttggagaaccggaagaagctagtgccttgcgggaacagcgcgcctacaatcttagtggctgcagtgttgaccagctgcgcccctgtgctctggtaatcacgctccaggggcctgcgtctaccgtccagggaatcgtcccgggtaaagatagtgctgagcgtccactgcgcaaacttctcagaggcatccaagacacccgcgtcctggtccttcttaaagagttctgctaatgttgctttttgttccaagctacccccttacaggcccagaggattgctctgccctgcttgtcgccgtttcttctgctcagacgtaattgcatctgcagatgcagaggcagcccctgctgggtcaatctcagcaatgttatctgcggcgctattagcctctaaggcagcctgttgtttagctgcgctggcctgctgctctgccaagcgctgctgtgcctctaatcctgcgttgtcagtaaggccgagcatatccgtggccttacctaacagtttacctaaaccaccactcattctgacctcactaaatgataagttgtcttgtacgtgttatccgatgtgctccggctaatggcaatacgcccggcgcgcatgcacttggctatcgcgtgcatcccctgcataatcacagtcactgccgcaccattgtccggttttagtacgaagaagtctgtatacagcacaggctctacgtaatgacagtcctccacagcttctggatagtagctgacagcaccgactaatccgccttgggagtcatagactcctagtatatactgtttacccaatatacttcccagcactctccagtagtgctgctctggagccaggccccgactaatgccgtggcccagttcgtgcagttgcttcactgcgtctgtaatgtcgtcagacttatacagaaccttgagagtgtaatcggaagttttactagtgtgttttaacttcattcctactccggtaacttcatttatcagcagaagaagaaaggcgattccagcacttgccggatgtccagggaacctacttctggcatatccaaatccgtcaagtccgccccagctgctgctgccgcgcgagtaatatccccaagcaggtcatgctcttcgtataggctcacaaactgttcgcggatgtgtcggtgcatagcgtcaacgtcagctgcatgtgtagccagcgagtcgtgaataggcacgatgtccaacccttccgcggcacacagaaccatcatcaagtgcgtactgtccaggctatgcacaaagttcggggcaatcccagaggctgccttgcgcttgttacaggtcttgaaatcccggttatgcacccgcatgacggtgaggttcatgcagtcaatgcgtacccgcacttcttcacgctgcgtgtaacggttcattacaagcccacccagcggcgtataccactgcagatgctggcttgccggtacgcgtctagcgaggttctgcaagtaccccataactgccgcagcagctgggttcgcctcttcgatagcggtacgcatacgcggcgccaggtagcacgacaggttccacaggctgttagtctcggcaccctcgtatccctcggcgcaagcaccttcgaagatgtagtcgctgcagctgcgcaccgtagcgctgtagaaataggtcatactggggcgcttggtcatactgcgggtgatttcgttctctctccagtacgtgctctggataacgaaatcctccttgtccaggtccagtatcaccttctcgtccgtacggcgcttcacgtccatgtacaggtcagctttcttatagttaccctcccagtacaggttcgtcagacgcccgcccacagggtctctcaggagcgctgagagatgctgcccacctgagtttgtagcgtccatagcaactgggattcggctaatatgctcttctgggcatccagaacgcacagcattaaccaggtcgatagcggcggccaataggcaccaagggctgtccgcggaggtgaaagcagggcaatcaaacggtgaaactgtaagctgctcaatctctgcaaagttcgcatcaacccaagctgcgcggtcttcgaataaggtcttgtcataaccaaagcatgtggcgacatgcaccttgagccagaataagccgcgatcacccagaggttttcctctgccaaactcaagaagggctttctgcaaatcagaaccttgagggtgcagcgaggacttgaagtacaaccggtaccgccaatccacgcaggttgggaagtacagagctttctcatctttgaattcctctgccatttctaacgtagtcaaaaggctgcgcagttgcgacacacgcttacggtctgcgctgtaccacagggacatgcgcgtcttccactcaccaaaacggtcaagctcttcctctgtgtagttctcttttggaacaccatccaagtaccactccggtttcggctccggtactgagcgcggcatgcctatcccaacacccatggcccgtgcttcttgcaccagttccagtatgcgcttattaatacggtacggggtttcctgtgccttattaagcgcttttttaatgccatccgcggacttaaatgcttccgctacttcacggagacgagctctgtcaatgtgcgagttatgataggtcccgcgattgtcgataggggtgaggtatccaccatcccacagagtagtgtgctgcaccggcggtaccagcataggcggcttcatggttacagtgtcagcggactctaccagtttctggaaggcctccataacgtcgtcagccggatagagcatgctcagattcccgctacagttcttccactggaacaggcccgtctcaaacaccgcggcacacagcagacgccctacggagatgttctgggcattggtccaaggctcgtgcccatagtgcacgttctcggcactggcgcggagcgtacgcaggatgtgcgtaggggacttcgtacggcgctctgtgaggtactcatacacacggtccatgtacgcaggggctacgttgcgtaactgcagagccagtagctctgactgtacgtttctgcccagtgcggacattaccgcctgtgcagtctgacggcgactggcggactcgccaggggcgacgctgaacgcctcaaacattgtgcacaggctcagagtggtcaggacgtccaaggggactaagcgcaggaaccgtcggtacttaccaccaatgcccggggctttgacatttcgcatctcatcgatagcggcagcagccacctcatatgccgaggtgagcatacgctgcgtcatcggcaggttcataatcccgccattctgcagtgcgtccgtaatcagcttacgtgcccgctcgattccgcgaatcttataggtctcttcaagctccagctggcgcttcaccagtgcttcctcgggtactacaaccgtattcagggcgctaatcataggcgcttagtctccttggttatgtccggtacttctaactactgattgcgactcacccagagattgtacatctccagatagtctttagcggagctttcgtcgccccgttctactgctttctgccacatcccgtggcaccatgcgctaggcgtcaatgcacttacctcggtgttgctcgtacagttctgagtacttgtcggacttggcaatgtcctgctccagcttatccttgttcccggcgcgcagtctgtacttgagccggttccccaggcagtatccgtagaactgctctttcgtcatactgcgtgcaatcacctcaattgcctccaggtccgggaagaactggtagtgccgaggagagttcactgagtcagaaacagcctcgctcttcgaatggaagagctggaagaactccgctcgccaagaggtcccacactcggctaaggttataagtccgtcttctgcgcacgtcactaatctgggggagtctaggtctacctgtagctgttcacagatgtccttccagataccccctacgtgactcgctttgcgcacaaccaaatcacctgcatagaatttagtggattcaatcatttaatagtctcccgtgctttgcgtcgtgcccgggccttgcgggccttgagcttctgtgcttgtgctagttcttccggcgtcttgtgcgtatagtatagcatatccgtaggttctcggtctaagtaatcggcgaccctacgtagagattcagcaatagccccagaagattgcatgctaccaacaatccagcgcccagcggcagatgccactttgccttcccctccattgcacgagcgatgaagagcaccccgaatacgcccagtaatatgacagtggtcaacgacaacagaatcaccagttacccccttgattgtgaagtccaaaggtttgccgcagaggaggcatatacctccctggtctttggcaagcttaatagccacagagcgaatctgtgctcgagttattttacgcagcgccatgaaatccctcttaacatatgatataccgtactttgagccatacccaggcgtctagctatagcgttgctaccccattcccggtccccaggaatgtgcatttgccgcagatagcgcaccgtaccttcgttcaaacgtgagcggccgctgctggaaccctttgctgatttgcttttgtgggtccctccatgcaggtgctcagggttaatgcagcgagaatttccacaggtgtgctgtactacttcgggccactctcctgtgtgttcatagtacgccttcctgtgtgcggttgtaggttggcgtttaccgtcaataagcacccacgcggataggaacccagtctttggccgcccctttctcccatggtctatacaaggtgtactcattaccatacctcaatccccccaactacatccagcatagcattgtcgtgaatgagagaatccaaatgctcaaccgttcttcgatgtgttttgggtgctcgttcacgcagcgcatccagaatagtttcaagttcatcgtgtttcccctcgtagtataactcaatcgcccgcaggctcatttccttcgcagacatcttcgccattgtctgggtgctcctgtatccactgtatatgctgtttatggtactcgtgcagcgaatgcacccagtcacgcagactgggagtagtcaacagtgacatcagatactgataggcagaatctgacggggagcgccgcaggaacaggcattctgcctctgcgagtacgtcttggttgtttcgagcgtaagccgctacgacgaattctgcggcgtcctgctctgaggtaatagggtagatagcatcaaaggccgttcgcttgccacagggcttcccatcaagcaacgtgatgcctttgacgttatctgcgtcgtcccctgctagcatctgccaccagaagaacttcaacccgtgtgctcgtacaggcatagcctgggtgtcatcccacttaatccatccgaatgggtcctccagtgcaggccacactgtacctgtcggtatatcgaaccgagccatagggctgagccaagaatccttgtcctgggacatcaggattccccggtctccgaagctgtacgaatccattacaaagaggtcgtcggcctcgaagtagtcactgctgactacctgaataccctgctcagaatactggtctgggttctcaatcaggtgccgcttcaacggtgccttgagcggtagctcctgtcgattagcgcgctgcccctgatagggcttagccgtaggcaggtgccagcgcaagcacttagcacatcctgcaggcgtcaggtacgccactgcctctgagcagccgaccaggaacatgtcctcaagcaccagctgatagaagcggcgtattgcggtatccaaacgttttactgtagcggcggctttgtacacgcaaaaatccgcatcgtacagcagaatcttcccagagttctgcggagctaactgctcgctaagctgggacaagtcaaccccgttgataatcatcagcgccccgtaatatcgcgggccttcttgtcggcccagttaacccaacgttctgcccactttgccttgctcagcttatcgccaaggtagcacagtcccgccaatggaatcagcgggagaatcaaagctacgtaaattgcgcgagatacgtacaacatacttaagcctccagttcagacagcaccagcacggtgccgagcatgtccccgattacttccggagtacgcaggctctggtctacgtcgtagatacaggagccaatctccgccaggccaacgctgagcgtgcccactacgcggataagtacaaggtcgtctcctcgtaacttatcggcatgtgccgccagatcgttgtgctcccggaaggctgtagcggccaggtccaggtccattccgtacagggccgccagctcatctagtgcgttgtagatgtcgtccagactaatattaagcaccccatacgccgctgcatcgtataccgctgagccgaccgtaatggcaaggttctcgtacgcttctaatactttatccattagtcaaatcctttcagtttgtgtttttgaatgaaggcgtaggctttggtctcagtggccgtggcctctgcgcccagggcgtatgcacggcgccgggacttggcgcactggcgattcaagtgataacgctgcgcactaatctcgggacccagaaggcttgccctgtatgcgtgagagctagctacccagcgccagtcgtctgctcgcttctgcaaacgctgtgcgcgcagaagcagaaacacagcgtactgttctttggcccatgtgattatgcgcatttatacccccaggaagttagctacttcgtcacgcttggcacgcaggttatcagcatgacaagcatgcgcttctgctacctctttgctgtgcttggaggcctctactcgcgcctcggattgagcggccagacgtactgcgtcgtctgcgaatttaactgacagctgctcgttaaactgcgctttggcatctgctcgtttagcttctgctgtgtaggctgcactcaggagtttgatgagaatgttgatgatgttcatagtcttcctctaaggccccatgcggggccatattagtttaggttagggtagattaggcttgaggtgcagcaggcgcagcgggcgctacaggagccgcaggagccactggagcagctggggctgcaggtgcttgcggtgcagcgggagccgccggtgcagaaggagcagcaggtgcctgcatagctgccggactcggaacagagccagcgttcagcataatatccagagcactgcccgggaagtctacggccttgtacatatcctcctgaatccagttcttgctcttaccgtcgtcgaaggtgccttcgatgtgtaggctgtcccaggtctctttggttgggttgttccacaggaacagcttaatctcagaggcatccagggctggcatcttgataggctcgccggtgttcgggtcgaacttcggaatcgggcggataccggacaggtccacgatgttagacttcttgcccgcagcactggtgtgctcatcaatcgggaaggtgaaggcctgccccagacgctgtgctgcatgcttaatgctattgtcgtagttgagcttgtcgaagaacttcttgaagcctgctcgctcaaagttactgatagccatcgggtacgggcggatacgcttcacttcaccgttaggaccgtacaccacaataccgatgcgcacgttagccactgcaggcttaccagtaggcttaccgcccttagttggtaggcgcttaccgatttctacgtactcggtgaagtagccgtagtattcgcccttcggaagcagtacatcctcatacgcaccgccctgtgaggtttcccgcatatctacatcttgggtttcgattgctgcgtctaccagagcgttcaaggatgccagtacattagtagtcatataatttatacctcgttagaaaagtgtttgtgatgctgagagataactgcttgccttgctaagtgggcctcttctgcggtagcgtagaatcctaggtggtattgtaccccatctgtttgtatgtaggcacgccacttaccattgcttttacgataagacactccacgataccccgaccgggaatccttccgcaatcctgcattcttcgcgtttcctgctttattggcctcccttaaattgacccaccgattatctgtacggtttctgtttacgtggtctataacgttcggccaacgtccgcacattaaggcgaaggccagtcgatgtgcaaagtattgcctacccttcacacttactaccctgtaaccatccttaatgtaacccacagcctcggaaccgtcaggcctatgcaatttccccgattcggggtcataccgcaaatattgcggcagagaagtagcgtgcatataccctctcgtttagttcaaatgatatttacgtgcagatgcaggacaggcctagcgattcttaagtgcggacttaatgcctgcagccgcggctgccgccacaccgcctgccgccaggattgccaacagcaaagctacaccgccgtagaacggaagcagcacccacagccaggaccaggcgataaccccggtcagtttcaaggttataaagataagacccagtacagaacagattcccattttcattggtacccctaattaggttttgattatgtcgccaacttttaaactcagagctgaggattcatctttataccaccgctctgtctcagatttgtgcccccagcagtcatactccagggttacacgatacacctggtattgctcatcccatacgggcgcacccactcgggtgacggttgcgtctagcaaattcatttgcttctccctacccatttcccggaatcgtcaagtaacatggggatgatttgcgggcatccatctgtaatcaccatacaccctagaatcggcttgcttcttgacaacttaccataagcaaaggccagactcttgttgtcgattaaacaaccgcagtgcgcaccaaagtacagggcagtgctgctagcggcatactgtatatctaacttcccatggaagtgtccaatcaccatggacttacgttcatgggctgcgttgagcagcaggtccccagatacttgatgttggaatcgcacaatacccagtggagtattcaaatcccaagcatcgccccaactccacccgggggccccatgctctgggaacaggatgtcccggtacttcttaatgaactgtacagggagtccatgagctttggctctgcggtagacaagagagccgtggttagagtcgcacaggagcaggttaggaaacaggttatgcagccgctccaggccaagcttggccttctctaactccaccccagcactatccaactccggactgctgtcgtgaaagctaatggcgtgcccatccgtctcatcgcctatctgcacaacaatgtctgggcagtactcgtcccgtacagtgcgcaaaaagtcgtacgcgtccggatgtgtgtacggctcgtgcaggtccccgataacgagaatacgtcgacaggtttccggtacaaacgtatccccaatgtcatccgttggggagggctggattagtttgcgggcttgcatcaaagcattattagcctttgccttgctgcccttgttatccatgaagatgctgcgccaatagcgcacaagctgacgagatacactaatgtccgtgtccacatccccgcgattatccagctcttggttgtagtactgagcagccagagcgttgtctaggtactggcccaggattgcctggtgctgctctttggtgaatagttttattaggctaacacgtgccattattgcctctcttgtgttgttcctactcgtatcacattaattctaggggaatcacagaatcaagccaaagtcaacaaataattttatttaattatttagttgaccctagcatatttccatgctaccctaaccccctacaccacccaagggtacacctatcactactcttcgataagcttgtactccccggggaagaaggtgacgccgtccccgggcctacttactaacagtccagggtaacttagttctatctcaccagtaaccgggtcgaagaatataaccgtgtgccttgtacctggggtgaagtatgctgcatacctcgggtctatcggctcaggcccaagatccatcaactccacaacactgcctgactttatactcattctaccttctccttactgtacatactcgtacccatctcagcctctgctgggaacgggacctcaccaatgataccgtagttaggccagagctggtggatacgcttaggtgcgtcctccatgcactgcttaaccagcaagctcgcctcacgtccaacctctgggttggcgctgtccaggtacagcgcatcgtgcacgttcgtaatcaggcacacctgattgtcgaaccagtcacgggccaagagtgcacgcagaaccataccggccgccaccgccatcaggaagaatgcttccccttggcaccagtagttcgccatctcggtttccttgtagtccatgaccttctgcttacgctgcccaggcacaacctccttccactgctctttctgacggaagctgtagcgggcaccagcagggctggtccacgtcccaatgcggtagattcgatagctgccgtcgtccgcctgctcccggtacatgcgaccctccgcaccggtacgctctacctcttccttaacaacagcgcggaagccaattgtttgcgggaacagcgcagcctcgttgtccaagaaagcctgtgcaaattccaccgtacatccagtagcaaacgcaatccccttagccgtagcgccatactgggctgcaaagctaggagccttaatacttgtacgcattgccttccaaagcggatgcagctcgtgcttcttgttgtggcagcgctcatatacttcttcatacggtaatccttcacggaaagctaggcggtaacagtgcatatccgtacctgcctgtagcaggcccagcagtttcttatcccctgtatgcacgcaggacataaccacttccagcgcagagtagtcaacctcagtgatgcggccgttatcaccgaatcggctggtgaatacctgcttcaccttggatttagccaccccatccccgtcctcatccgggcggggtaggttctgcaggttcgggttagaactactaaggcgcccggttacggtggcacaggtattcaggcggtggtgtatgattccggaaccatcaggacgttcagggattacgtactgcagcattcccttccgctctttgacttctccgtttgcatccagaacttcccgcaaatagtaagtaccagtgtccttctcaagcgccgccagctcgtttaccaacttacagaactcgaacccttggcgagccagtgcctccattgcgtcagtgctggtgctgtatactggcgtgccgtcatgcagggtacgcgcctgccggaactctccgcgctctgcgtacttctcccggataacttccggaagctcctggatgtccactaggcccggacagaagtaaaggtcatcctcccacttaagtttctcctcctctgtatcaaggcggaatacttttggcagccccttgttcttaccggacttgtacgtggttgcaccgggtggcgcgggcatgtcgtccacggcaacccaagtgtccccgacttgccaatagtctgccttgacatactgcggggggaaatatggaaccttcttgcggtacttgataggtccgccgtacaccagtgcagacatatggaagtccgaaccgaagttgaaatccagcgtctccggcaagtccttcgggatgtactgctgcagctcctgcttaatctccaggatgcgctgctcctgctcttcttggttcttgcgagcaatcggcatattcacgaacaggccgaaccattcgcagtacgcccaagccagcaaggcatccatgcgctcccacacgtactgcatctgattgcgctgggcgaacgtagcgcactggccgtagaagcacagggccgtgttcgggatgtccccgttaaccaggtagtcgtgcagtagcatcgggtcaatctgggaggttagcacaccctgctcccacagaagcttaaccccgtctactttgtgcgtaccaccgtacttaggagccgtctcgtccagcgacggatacatgctctgaaagtccgaggcgatgtattcagaatgcatcgtacagaatacgcgacctccccgctttaggaaggcctcaaactcggcgcgcgcaaaggttaggaaccagctaatctcatatgcggcgttgtgagccacaatcagccaacagtcagctggtattgggagccattctgatacaggtgccgcttcaaagtgcgcgcgactgttataccgtacactctctacggggcctacttctaccgtaccgtcatcgtgcgtgcggtcaatacgccacgctgattctacgatgtaattatccggacagtacggggaagcaacactaccgtaatatgggtggttttgcgtctcataatccgttatcaggatgcttctgctcattccataccctcccctttatgatattagatatgtatccttgacttgtcccgaagcgtctcgctatagatatctgggtctcaccgccagcgtatgcttctcgtatgctgtgcacgtcttctggggtaagtctggcagcagggttgcggctgcccagcaaattacgcgcacctttatttcggtcctgcatattatcgctaggagtccctagtagcaggtgctccggatttatgcaccgaggattgtcgcacgaatgccggactacaagtcccgcgatatcgctcagcttcaagttgtgggctatacagtatgctttgcggtggctgccagttgtcttcccgtcaaatctggagcggccatacccagcgccctttcctcggcaagtgcttcccctctgtccgtggtcaatacaacctgtcatttccacttagccctccgagccttgttgatagccagatgcacaatcagctggctgctgtccagtgcgaatcgtttacggaaagtacctgcagatgcagcgtacgccttgattacctcgtcgtctaggtagttgatgtctgacggtttaagcatactagtaaatctcccagcagtgatataggccctacaatatcccactctctctgattgtaacgtgccccgagttccacggtacaaaattccccggtaacgcggtgtcgcaccacgtaactaccgcgtataagtcctgtgtaatccactttttggataacccctgtatagtctacttgcataaatcctcctgtgtacctacatagcgccctcgtagaaggcgctagggaagtcacttgattggtggcggaggttcgatagcctccagcagcggctgctgcagtaggtaagtgttgtactcctgtatcgcttgtactgccaacccgcgcaggcgcagtgcttcgtttacgtcccaagcagcaccggtggatacaagagagaacgcatcagcatcaaagttgaatgtgctctccttagattcagtcagtcctatgtaggcgccgctttcacttacggcgcacacagtgtaagtcctgccaatcttcacgccagtgcggtagaatatatcacgcggcacaacggtgctgcgctttactttatcgccaactttaaacttagacattaatttggccctcatcaaatctacaacgacccggctcgaatcccacctcgaattgcaggagcgattctttaccagacagtgccatcttgttcttcggagtactgataccacggacgttttgcatgtgcggctgctcgttcctgtccaagcatcccatcataatcgccaagtccaaggcaccctgcacgccaatcttgctctgcttcatagcggtgagcggcgggaacagcatgttgtaaccttcgagtgaaagctgcatagtgcctacaatagcgcagtcgttctcgcacccaaggatacgcagctcctgccatttcgcctcaaggttctggtgctcactctccatagtgccgccacggatattcgccaccatgtcgatgatgattaccgcggggcgcatctcctccatgagcgtggatatctgcgccatcgtcaatgagtgcgcagccttaacacgaatccggtcagccctgcctactttcttgaggtaggctggcacgaactcttgcttactgtgccggtccttaatctccgccagagtccaatgcagcgccgcttgatatacccgcggcactgtgcgcgtcgccggaccctcgttaacaagccagaggatagggcggtccccgtacacttccggctgctgctgcatttgctcagcaaaatccacagcaatagcagcaagcagactagttttaccagagtccacaggagcagccactgcgatacagtccccgccacgtagacctcggatgttgctagcgagttgctcgaacacgcccagtttaagaccgccgctctcgtcagtcgcggcaagtatttcgtcaacactaccgctctcccattcaagcagcgaatcatgaacagcagcaccgtccccgtacttgcgctggaggtgcttcatttccagcaggtaatcaacttcctccccatcctgatagcgttgcgtcagcgcggctacctccccgctgtaggccagctcgttcagggtctggacaatccccaccacagaatcctgcggtacggcctgtactccccgcataagctcgtccatgattaccctctcttcccgggataagtgaccggcccggaggttgagcatgctctgcatcgcatcccactgcacttcctggtgctccgggtacgtgttccagtacaaccccacccagtctagtaggttcgacgtatccggcgcgagcatggacttgggtatctgttcacgcagtcggttccacaccttctgcgtgcacattgcacgaacaactattaggtccaattagagcctccaagttttagctttcaatacatcgtgcactgctgacacacttacaccaaggctagcagctatggccggtgtgccgtgttccctgctgtaccgcctgtaggtcttcctgatatagtccacctgctgcgctgttagcttggagtacccattctgctcccctttagaaactccacgtctagccctaccccgggcaatacagtcatggacgttatccttgaccgtacctaattctaaatgctcgggattaatacatctcgggttgtcacacttatggcgcacaactagccccgctatgctctccggagatatatcgttcgccgagcaatacacctttctatgcaggggtatcttccgccctttgaacgtggtatttccgtaaccctttggtccgcctttctgtttgtgctctttacacgcgcctaataccatctaataactcctgtattgttgcctcttttgggtccccgtcgtagtagatttcgtggcacgacataaagggacgtagcgcgcgccgtatcatggccgcgccggagtgtcccgcttggtcattatccagggacagtatcactgtcggtttgttctgtatcagccacgcccttaactgcacgggcaagcgagtacccagcatagctatagcctgcacgttcattgcagagtagttcgtaatcgcgtgctgatatttgatcgctgatagatagtcctcggtgagcacgacctttagaggtgcggccgcagctacatccggtgctacggcaggtgccgcggcagcgaatggtattggttggccgtacattacccacttcggttgctgtcgagcatgaactgcacgacccagagcagcccttccgacacggaagattatccgctgtttctctttgctccattctgcatcccccaccatttcaggcatgattccctttgtgattaggaatccgtaaataaaactctgcgtttccgcaggcgcttggctaatgcaaattgcatctgcaggtgcagagggctgcaccctcggctcttcctgtaactgtatgcgctggtactgcttgtgctccttgcccacctgcttgcagcggtggcaatagtattcccaggcatccgggttattgtagagcaccccggcggcgtccctgccgcagcaccgaaagcgagccctctgccctacggccaggcgcttgcacgctctaagccagggctggtccattacttaatttccagggtagtggcgtaagtcaagtcgggttgcctaagaatctggtgctcgttcaacagcaccggtgccccgtcatgcaggtagaacatatccccaccaggagattttatggcccagtaaatctttgcaccccaggtaaatggaactgccgttctgggggcatcaggcaaggtactatagtttatggtactaggcatttgctttctccttccgtttgatttccatagccatgcggcgcaggtcgtgtgccaactgcagggctgaatcggggtcgatgttaatcccaatctcaacctttgcccgagtgcttcccttcttaggaactaccccgatgtacattaaaccttccccatccccattatccttctcaagaactaggcgttggtcatttcccgggtcgcgcttagagttcatgtaggccgccttgtccgggactggcggcagctcatccttcgggtcttgatacagctcgaagttatcggcgtaccacgggtaggggtcggctcctccatctgtaaagttatccaactgcagccagtggccgcttgtagctatatctgtaattacgtagtaagcaaaatcccctaggtacgacttgagcgacgaattgtttttgtgtgctttgcgaacaactttatcaccaactttaaacttagacataatcaaccctccacaatattatcgtatccgccccagtcttctacgactcgggtgcctagttcaatcagttcttctttaaagccgtaatcggagaacaccattatgtactccgtcgccttctctggattctcctgcacccagctaatcagttgctgcttagaaagttgtgatacctctcggaacgctgccagtaactgcgggtcctcagcaggcggcatgtcccacggctgccgtaaactgagcgttggtgcagagagccattggtctggttctactaccctaggatcccgctcaatcggaaggtgcgagaacgtgccatcttgtagtacacgctcaagcacttgccccaggatgttcaggtccagtacctcatccggggtgtgctcgtgcatgtaccctacacctacgttggtgcactcagggatgatgccaacgaactcggctgagtcagtgtacacccccttctgtaagtgctgctccgtgcgtcccaggcgctctgctagggtcttggcaaaggtgtcagagcagcagcgcatatacctttgatgcgtaatgataccgtcgccgcggcggtcgaagctgatcatagccttgaccccagtccaaaatccagagtcatccttaaccgatgcagcgctaccctcgcagccaacctcttcgtccacgaagaagcagtagcgtccgtgcacaccccgccgcagcatctccagcatcaggtagataccagcaccgcagtccgcccccaagcagtcagcttgttgcggattctttacgaacagcacgcccttgttagtgcagccgacgtccggtgcagcgctggttgggcgcgccactgtgtcgaggtgcgacgtaaacgctacgtcactttgttcggagtccccgaccagcacgaagtagttcccgtgcttgtcctttacgtagtgcataccactacccagcgcctgcataagcagcggctcaaaccacttagtgctgccccagctaggccggtgcgtttgcagtatctgcaagagcagctgcatatcaatcccatgcggattcaagaacattaagctgcctcctctatttcttcatcgtcgttgcccagatacttctcccccaagcaatcggctgcatactcagtgagaatcaacccgtgcacagggtgttcttctgcgtgctcaataagcacctgtcggtcctgtgcatacaccagttcttcttggtcatgcactaccccctctaccgaacagtgctcaatgtctccgtcgtatacataagcgtcgtggtaatcagaccaagtgcaactccatcgattatacagaccctcgcgcccaactacgtatacaaactccccctcttcgaggcagccgtcgcagaccatttcataatcggcggtttcgtgcatatcatcaacggagtagcgccccccgcagcagcagcaccgagcagattctgtgccgacgtagatgtacccttctgattcttgcgcctcgtactcgtagtcgtcacgtattacaaaggcgtcactgccttcttcgtctacgccacgctggctgctatcgagatatggcatcagcactgcgccgttgtaggttgggtgcggtatgcgtgccagcattaccccctcgagacattcagtgtttctggtgtacccatgcccccgcaggattgcatccgcagcgttgccgtaagcacggacgtactctttggtttcaggttttacgattgctcgtgccagcacttcgaagtcgtccccgaaaagctccccggtatactggatgaataggcgcaacccgttatccggcaacccgtggctggtggtggcgtacgtccgcacagggctatgcttaaatgagtacccgctcatgcagctacccgggccattctcgtaggcgtcgtaccattcctgctcggtcttgcacaggtacgttgtagggtctacgttcatagccttgaggtcttcgacagcatcgcggaagtctaccccgtttccgtagtagttagcgagccacttaccgacgcgcatctctacgcaacggtactcattaactgcggcgaagtccttatgcatccgcggctgccccagcatcacgatgggctcaccgttgcggaaaccaaagcccaaaggcacggcgaatctagacactacgaagccgtgcaacttcatgagcagcgcagcggcgttgccatcgcggaggtggcgtccgtaatcgtagccagtgtactcctggcgctgccgctcttctggtgcaagcataatgcgctcgaataactgcacggcctgcttgtgcaccttgtaaccggtgaactcttctacactagcaactacgcgctcaaccactacatcatcgccctcatagaagtcgcggcggcgttcccagaacttgctgtcgatggtgattcgcgccggggaaaagagttcgtagaaagttccagaccggtacaggtctaccttttgcaacgggccgcgagtcatcattacttcgcggtactcagggtgcagtatcccgcctatagtcacctctaagccaggggtgtaagcgctgacagtgcggagacccataagcgcctgcagcggaccctcattgtgagggtggtcagaaccttgcatttgcaagtcctggaacggggtccagtaatcaccgctggaatacatcgaacatttcattggcagtgcgtttgcaccttccggcaacactactttccattcgataggtgctgtgccagtttctttgatagtctcttgcattttcatttgctcccgagttaattgtattgcgtcgtgtattaatagctcagcgtgcataccacgcagcgagttgtcgttgcttataatatgagcgcacagccgccctaaatcttgtataggctccacgatacccgtaccgtagtagtgctgcgaccacatcaaactcaatgtgctcttgcaactgccgcgcggcagattctgtatactcgcggtacgtggggagcaccaccgcagagtcctgcttacgaactcggaggagtctacgctcgactggtacgattttcttgagctcattaggaacctctttgaatgtttcccacggacacccgcacttgccttgtgtctccagcaagcgccagataaacgccgcggtttcgtctacagttagcataggcttctcttagtcacgcagtttcgtgccaccaacacaaaagccggagaggtgataacgtcacctgctcggtaactgctccgcattaatcccgcagaggttaaaagtatgcggcgctcattaattgccccttctaaagggatgagataatacagaccgctataggtctcccggtacacgtcatacttcatactacaccccgcacattaaaccggtaacagtagccgcgcagggtcatacccagtcgctttgcttgtttctcatagtgctgtcgcagtcccgcctttgcgctgtactcccgcgccagcccgtcgattgttggttgctgcttacgcatcagcagcgtttcaggattctttccgtaagccttcatgccgtacccccactgacacggcgcacgcacatgagcttagtgtaaggcccaaaactatcatagcggcgctctgcatacacagctactacgtcatcggaaaccttgacctcttcgcccaagtatcttgcaggcaaggacttgtactttccagtgcaatatgggtacttgatagcgccgggatttgcatccgcaatacgcaacgcctcagatttacgaatgaactttaagactttcatagccgccaacacctctcaaatttcgttgttgctcttaccatccacagtgagcgtcaccgcggcgtccgggtactgctcctgcaccgccgcaaggatacgcgcacccagctctttgcagccgccctccgggtattcgaataggtcgtactcagggcgtggctgcagttgctgtgttgctggctgctgcaattgcacagtacagtagggcaccgggttgcttgcgtcatttcccagcaccagcatagcgctggtcacaatgatgttgaatacattaaccatagagttgtctccagtcgttgataatgccaagattcacggcgtccagcacagtgcgggcagccatttcggtgtagttatccacaaattctaaaggggattcctgattagtgtctttgtcagagaatataaccacagtgtagctgtattcttcgtatatccgattgcaccacacgggccagagttcatggcccggatagaccagtattgctttcatatgaaacctcatacgccagttgcattcacatagcgccccgtaggacgctataggcttgctactaggccactgccttcaaagttgcgtccagcacagcacgtacatccacgccctgattaatgagcatactcaccaaatctgcgtcgcttacgccagtctctttggccttcttaatggcgtttttaacgcgccccagcgcttgcaagcgcactgcatcagcgtccagcgcgtcattcttcacctgctccgcttcggcagcgtacagggccatacaggagctatagaagctggcaacaataacttcgcggccctgcttgtcagcttgtttgtagtcaagacgcatagtgtccagttcgattcccagcttctcagccgacgcatagcacttcttagcgttgaactcgtacttaccggactctttgttgaacttgatgggtaatagcgtacgcagcaccatatcaaagtcagcagcgtcactgcgctgcatatccgtagcccaggaaacgttgctgctgataagaccgtggaagagcgcgctgatagtgatgttacgctttgcttccactacgtcgcccagcgctttacgaatgctacccgcagcggtgagcttgaatactttaccagttgaatgggtcataatacacctctttgattgatttactatcggttaatttcacatagcgccccgtaggacgctataggctattaaccttcaccgtagccaaccatttggcacctccctagttgcttagataattactccacatagcaccccataggatgctataggctgtaattagtgcccaaattgggagttaacagcaggccacccactaggctgtttactgccgcccttttgtttttgctttcccctcaccctgtgctcaccgctcaaccattgtttgctgggctccacagtaagcggcacgttatcggtagggttaagtgataactgcatattccgccgtaatgctaggcgttttgctttgcgcataatctcacctctcagagtacataatctagcgcagccttgttactgctacgctatgttatatgctctttgcggggtacactccgcgccttgttccctcgattcagaggagcgagctgctctcgcctcggcagtatggtttgcctcagaaccccggtgataacgtccggcacgcttactctttttaactgattatctaggctcggtcgtcatcgtaccagtcaaggtactgggcctccccgcaaatcagcttactgcttgctatctaagttactcagttaatcggaacttgtcaagcgtttatttcttactacttgctggctgtccagctcggggtattcggtagttcccaaccagcctgtttccctaaactccgatgagcatcacttcttaggggttatctcgctgttagcctctcagcgccctatcgtggttagggttccaatcgcgcatttactgttacacgacatattcagttactttgggattcaatctagcttatgttcttcgcggtgtcaactctttttatcgagtgtctaacccttcacactatctagccttaatccggcggagcctcccggctcggctccgttcagcacctcagcgcctcccggtgattgaactatagccccattgaaccaaaagaagcaagtaatattttcaactttttatcactaagagcaaaaagggtaagcagggcaaatacttagagctgcacttagaaccacactagggatagctctaggggtactctaaccactactaaccatactgcatagtactgcatagagcgtagcgtagtgacgtaaggaacgtagtgtagcgtagttaatgcttccctccctacggtcggtcatacagggcattactagtgagtactagtgagtagtagtgtatatagtgccctaaacccctcctactccggttacttcatttcataatagctttcgaatgaaagtaagagcaaagggatagcgctgggatagtggatgtgcgccctagtggggagcgcgcagcgtagcacagaatccgcgcaatgtaaagcactaaggatagccagtggatagcctagtgcatactagggatagcactagggacagcactacagcgcactagctggcccactatggccccactactggccccgctggacaggcacaaaataagcaaggcagagcacgcccctatggcccacagggagcgcacagggatagccctagcgcctcatagcacgcactgagagcgcacaggaagcgccctagtgaacgcacaaggacaggcatagggtagcactagcgatagccctagaacgcagcacaggcccgctgaggccctctggtgcgcactagcaggcccacccagtgcccccccccccc

SEQ ID NO: 44 - DNA, 43536 bp, Unknown
  source: /note="Description of Unknown: KP2M-P0204 Bacteriophage sequence"
cccagtctaggcgagcagatctatacctggacctgaaatttattagactcacgcgagcccctccctcaccctcaacgacgccaattgcccccataggggggtacctagcgtcaatttagggggggggcactgagttggcctgctagtgcgcaccagagggcctcagcgggcctgtgctgcgttctagggctatcgctagtgctaccctatgcctgtccttgtgcgttcactagggcgcttcctgtgcgctctcagtgcgtgctatgaggcgctagggctatccctgtgcgctccctgtgggccatagggacgtgctctgccttgcttattttgtgcctgtccagcggggccagtagtggggccatagtgggccagctagtgcgctgtagtgctgtccctagtgctatccctagtatgcactaggctatccactggctatccttagtgctttacattgcgcggattctgtgctacgctgcgcgctccccactagggcgcacatccactatcccagcgctatccctttgctcttactttcattcgaaagctattatgaaatgaagtaaccggagtaggaggggtttagggcactatatacactactactcactagtactcactagtaatgccctgtatgaccgaccgtagggagggaagcattaactacgctacactacgttccttcacttacgttacgtcactacgctacgctctatgcagtactatgcagtatggttagtagtggttagagtacccctagagctatccctagtgtggttctaagtgcagctctaagtatttgccctgcttaccctttttgctcttagtgataaaaagttgaaaatattacttgcttcttttggttcaatggggctatagttcaatcaccgggaggcgctgaggtgctgaacggagccgagccgggaggctccgccggattaaggctagatagtgtgaagggttagacactcgataaaaagagttgacaccgcgaagaacataagctagattgaatcccaaagtaactgaatatgtcgtgtaacagtaaatgcgcgattggaaccctaaccacgatagggcgctgagaggctaacagcgagataacccctaagaagtgatgctcatcggagtttagggaaacaggctggttgggaactaccgaataccccgagctggacagccagcaagtagtaagaaataaacgcttgacaagttccgattaactgagtaacttagatagcaagcagtaagctgatttgcggggaggcccagtaccttgactggtacgatgacgaccgagcctagataatcagttaaaaagagtaagcgtgccggacgttatcaccggggttctgaggcaaaccatactgccgaggcgagagcagctcgctcctctgaatcgagggaacaaggcgcggagtgtaccccgcaaagagcatataacatagcgtagcagtaacaaggctgcgctagattatgtactctgagaggtgagattatgcgcaaagcaaaacgcctagcattacggcggaatatgcagttatcacttaaccccaccgataacgtgccgcttactgtgaagcccagcaaacaagggttgagcggtgagcacagggtgaggggaaagcaaaaacaaaagggcggcagtaaacagcctagtgggtggcctgctgttaactcccaatttgggcactaattacagcctatagcatcctatggggtgctatgtggagtaattatctaagcaactagggaggtgccaaatggttggctacggtgaaggttaatagcctatagcgtcctacggggcgctatgtgaaattaaccgatagtaaatcaatcaaagaggtgtattatgacccattcaactggtaaagtattcaagctcaccgctgcgggtagcattcgtaaagcgctgggcgacgtagtggaagcaaagcgtaacatcactatcagcgcgctcttccacggtcttatcagcagcaacgtttcctgggctacggatatgcagcgcagtgacgctgctgactttgatatggtgctgcgtacgctattacccatcaagttcaacaaagagtccggtaagtacgagttcaacgctaagaagtgctatgcgtcggctgagaagctgggaatcgaactggacactgtgcgtcttgactacaaacaagctgacaagcaggaccgcgaagttattgttgccagcttctatagctcctgtatggccctgtacgctgccgaagcggagcaggtgaagaatgacgcgctggacgctgatgcagtgcgcttgcaagcgctggggcgcgttaaaaacgccattaagaaggccaaagagactggcgtaagcgacgcagatttggtgagtatgctcattaatcagggcgtggatgtacgtgctgtgctggacgcaactttgaaggcagtggcctagtagcaagcctatagcgtcctacggggcgctatgtgaatgcaactggcgtatgaggtttcatatgaaagcaatactggtctatccgggccatgaactctggcccgtgtggtgcaatcgggtatacgcagaatacaactacactgtggtcatattctctgacaaagacactaatcaggaatcccctttagaatttgtggatacctacaccgaaatggctgcccgcactgtgctggacgccgtgaatcttggcattatcaacgactggagacaactttatggttaacgtgttcaacatcattgtgaccagcgctatgctggtgctgggcaacgacgtaaacaacccggtgccctattgcacagtgcagttgcagcaaccggcggcgcaggaaccgcagccgcgccctgagtatgacctctttgaagaccccgagggtggttgcaaagagctgggcgcgcgtatccttgcggcggtgcaggagcagtacccggacgccgctgtaacgctcacggtggacggtaagagcaacaacgatatttgaggtaaggtatgcacggaaagaatcctgagacgctgctgatgtgtaggcagcaaccaacaatcgaaggactggcgcgagagtacagcgcgaaggcagcgctgcgccagcactacgagaagcaagcgcagcgcctgggtatgaccttgcgaggctactgcctgcgctttaatgtacgaggtgtagtatgaagtatgacgtgtaccgagagacctgtagcggtctgtattatctcatccctttagagggggcaattaatgagcgccgcatacttttaacctctgcgggattaatgcggagcagttaccgagcaggtgacgttatcacctctccggcttttgtgttggtgtcacgaaactgcgttcctaagagaagcctatgctaacagtagacgaaacagcgctgctatgctggcgtctgctggaaacgcagggcaagtgcggctgcacttgggaaacattcaaagaggttcctaatgaactcaagcaaatcataccggtcgagcgtagactcctccgtgttcgtaggcaggactctacggtggtgctcaccacgtaccgcgagtatacagagtctgccgcgcggcagttgcaagagcacattaagttcgatgtggttgcagcactgctacggtacggatatcgtggagcctatacaagatttagggcggctgtgcgctcgtattataagcaaagacagctcgctgcgtggtatgcgcgctgacttggcagttaacgacgaactcattgaatctattcaggagcaaattaaaatgcaagagactatcaaagaaactgtcacagcacctatcgaatggaaagtagtgttgccggaaggtgcaaacacactgccaattaaatgttcgatgtattccagcggtgattactggaccccgttccaggacttgcaaatgcaaggttctgaccaccctcacaatgagggtccgctgcaggcgcttatgggtctccgcactgtcagcgcttacacccctggcttagaggtgactataggcgggatactgcaccctgagtaccgcgaagtaatgatgactcgcggcccgttgcaaaaggtagacctgtaccggtctggaactttctacgaactcttttccccggcgcgaatcaccatcgacagcaagttctgggaacgccgccgcgacttctatgagggcgatgatgtagtggttgagcgcgtagttgctagtgtagaagagttcaccggttacaaggtgcacaagcaggccgtgcagttattcgagcgcattatgcttgcaccagaagagcggcagcgccaggagtacactggctacgattacggacgccacctccgcgatggcaacgccgctgcgctgctcatgaagttgcacggcttcgtagtgtctagattcgccgtgcctttgggctttggtttccgcaacggtgagcccatcgtgatgctggggcagccgcggatgcataaggacttcgccgcagttaatgagtaccgttgcgtagagatgcgcgtcggtaagtggctcgctaactactacggaaacggggtagacttccgcgatgctatcgaggacctcaaggctatgaacgtagaccatacaacgtacctgtgcaagaccgagcaggaatggtacgacgcctacgagaatggcccgggtagctgcatgagcgggtactcatttaagcatagccctgtgcggacgtacgccaccaccagccacgggttgccggataacgggttgcgcctattcatccagtataccggggagcttttcggggacgacttcgaagtgctggcacgagcaatcgtaaaacctgaaaccaaagagtacgtccgtgcttacggcaacgctgcggatgcaatcctgcgggggcatgggtacaccagaaacactgaatgtctcgagggggtaatgctggcacgcataccgcacccaacctgcaacggcgcagtgctgatgccatatctcgatagcagccagtgtggcgtagacgaagaaggcagtgacgcctttgtaatacgtgacgactacgagtacgaggcgcaagactcagaagggtacatctacgtcggcacagaatctgctcggtgctgctgctgcggggggcgctactccgttgatgatatgcacgaaaccgccgattatgaaatggtctgcgacggctgcgtcgaagatggggactttgtatatgtagttggccgagaagggctgcataatcgctggagctgcacttggtctgattaccacgacgcctatgtatatgacgcggacattgagcactgttcggtagagggggtagtgcatgaccaagaagaactggtgtatgcacaggaccgacaggtgcttattgagcacgcagaagaacaccctgtgcacgggttgattctcactgagtatgcagccgattgcttgggggagaagtatctgggcaacgacgatgaagacatagaggaggcagcttaatgttcttgaatccgcatgggattgatatgcagctgctcttgcagatactgcaaacgcaccggcctagctggggcagcactaagtggtttgagccgctgcttatgcaggcgctgggtagtggtatgcactacgtaaaggacaagcacgggaactacttcgtgctggtcggggactccgaacaaagtgacgtagcgtttacgtcgcacctcgacacagtggcgcgcccaaccagcgctgcaccggacgtcggctgcactaacaagggcgtgctgttcgtaaagaatccgcaacaagctgactgcttgggggcggactgcggtgctggtatctacctgatgctggagatgctgaggcggggtgtgcacggacgctactgcttcttcgtggacgaagaggttggctgcgagggtagcgctgcatcggttaaggatgactctggattttggactggggtcaaggctatgatcagcttcgaccgccgcggcgacggtatcattacgcatcaaaggtatatgcgctgctgctctgacacctttgccaagaccctagcagagcgcctgggacgcacggagcagcacttacagaagggggtgtacactgactcagccgagttcgttggcatcatccctgagtgcaccaacgtaggtgtagggtacatgcacgagcacaccccggatgaggtactggacctgaacatcctggggcaagtgcttgagcgtgtactacaagatggcacgttctcgcaccttccgattgagcgggatcctagggtagtagaaccagaccaatggctctctgcaccaacgctcagtttacggcagccgtgggacatgccgcctgctgaggacccgcagttactggcagcgttccgagaggtatcacaactttctaagcagcaactgattagctgggtgcaggagaatccagagaaggcgacggagtacataatggtgttctccgattacggctttaaagaagaactgattgaactaggcacccgagtcgtagaagactggggcggatacgataatattgtggagggttgattatgtctaagtttaaagttggtgataaagttgttcgcaaagcacacaaaaacaattcgtcgctcaagtcgtacctaggggattttgcttactacgtaattacagatatagctacaagcggccactggctgcagttggataactttacagatggaggagccgacccctacccgtggtacgccgataacttcgagctgtatcaagacccgaaggatgagctgccgccagtcccggacaaggtggcctacatgaactctaagcgcgacccgggaaatgaccaacgcctagttcttgagaaggataatggggatggggaaggtttaatgtacatcggggtagttcctaagaagggaagcactcgggcaaaggttgagattgggattaacatcgaccccgattcagccctgcagttggcacacgacctgcgccgcatggctatggaaatcaaacggaaggagaaagcaaatgcctagtaccataaactatagtaccttgcctgatgccctcagaacggcagttccatttacctggggtgcaaagatttactgggccataaaatctcctggtggggatatgttctacctgcatgacggggcaccggtgctgttgaacgagcaccagattcttaggcaacccgacttgacttacgccactaccctggaaattaagtaatggaccagccctggcttagagcgtgcaagcgcctggccgtagggcagagggctcgctttcggtgctgcggcagggacgccgccggggtgctctacaataacccggatgcctgggaatactattgccaccgctgcaagcaggtgggcaaggagcacaagcagtaccagcgcatacagttacaggaagagccgagggtgcagccctctgcacctgcagatgcaatttgcattagccaagcgcctgcggaaacgcagagttttatttacggattcctgatcacaaagggaatcatgcctgaaatggtgggggatgcagaatggagcaaagagaaacagcggataatcttccgtgtcggaagcgctgctctgggtcgtgcagttcatgctcgacagcaaccgaagtgggtaatgtacggccaaccaataccattcgctgccgcggcacctgccgtagcaccggatgtagctgcggccgcacctctaaaggtcgtgctcaccgaggactatctatcagcgatcaaatatcagcacgcgattacgaactactctgcaatgaacgtgcaggctatagctatgctgggtactcgcttgcccgtgcagttaagggcgtggctgatacagaacaaaccgacagtgatactgtccctggataatgaccaagcgggacactccggcgcggccatgatacggcgcgcgctgcgtccctttatgtcgtgccacgaaatctactacgacggggacccaaaagaggcaacaatacaggagttattagatggtattaggcgcgtgtaaagagcacaaacagaaaggcggaccaaagggttacggaaataccacgttcaaagggcggaagatacccctgcatagaaaggtgtattgctcggcgaacgatatatctccggagagcatagcggggctagttgtgcgccataagtgtgacaacccgagatgtattaatcccgagcatttagaattaggtacggtcaaggataacgtccatgactgtattgcccggggtagggctagacgtggagtttctaaaggggagcagaatgggtactccaagctaacagcgcagcaggtggactatatcaggaagacctacaggcggtacagcagggaacacggcacaccggccatagctgctagccttggtgtaagtgtgtcagcagtgcacgatgtattgaaagctaaaacttggaggctctaattggacctaatagttgttcgtgcaatgtgcacgcagaaggtgtggaaccgactgcgtgaacagatacccaagtccatgctcgcgccggatacgtcgaacctactagactgggtggggttgtactggaacacgtacccggagcaccaggaagtgcagtgggatgcgatgcagagcatgctcaacctccgggccggtcacttatcccgggaagagagggtaatcatggacgagcttatgcggggagtacaggccgtaccgcaggattctgtggtggggattgtccagaccctgaacgagctggcctacagcggggaggtagccgcgctgacgcaacgctatcaggatggggaggaagttgattacctgctggaaatgaagcacctccagcgcaagtacggggacggtgctgctgttcatgattcgctgcttgaatgggagagcggtagtgttgacgaaatacttgccgcgactgacgagagcggtggtcttaaactgggcgtgttcgagcaactcgctagcaacatccgaggtctacgtggcggggactgtatcgcagtggctgcccctgtggactctggtaaaactagtctgcttgctgctattgctgtggattttgctgagcaaatgcagcagcagccggaagtgtacggggaccgccctatcctctggcttgttaacgagggtccggcgacgcgcacagtgccgcgggtatatcaagcggcgctgcactggactctggctgagattaaggaccggcacagtaagcaagagttcgtgccagcctacctcaagaaagtaggcagggctgaccggattcgtgtcaaggctgcgcactccttgacgatggcccagatatccacgctcatggaggagatgcgccccgcggtaatcatcatcgacatggtggctaacatccgtggtggcactatggagaccgagcaccagaacctcgaggcgaaatggcaggagctgcgtatccttgggtgcgagaacgactgcgctattgtaggcactatgcagctttcactcgaaggttacaacatgctgttcccgccgctcaccgctatgaagcagagcaagattggcgtgcagggtgccttggacttggcgattatgatgggatgcttggacaggaacgagcagccgcacatgcaaaacgtccgtggtatcagtactccgaagaacaagatggcactgtctggtaaagaatcgctcctgcaattcgaggtgggattcgagccgggtcgttgtagatttgatgagggccaaattaatgtctaagtttaaagttggcgataaagtaaagcgcagcaccgttgtgccgcgtgatatattctaccgcactggcgtgaagattggcaggacttacactgtgtgcgccgtaagtgaaagcggcgcctacataggactgactgaatctaaggagagcacattcaactttgatgctgatgcgttctctcttgtatccaccggtgctgcttgggacgtaaacgaagcactgcgcctgcgcgggttggcagtacaagcgatacaggagtacaacacttacctactgcagcagccgctgctggaggctatcgaacctccgccaccaatcaagtgacttccctagcgccttctacgagggcgctatgtaggtacacaggagggtttatgcaagtagactatacaggggttatccaaaaagtggattacacaggacttatacgcggtagttacgtggtgcgacaccgcgttaccggggaattttgtaccgtggaactcggggcacgttacaatcagagagagtgggatattgtagggcctatatcactgctgggagatttactagtatgcttaaaccgtcagacatcaactacctagacgacgaggtaatcaaggcgtacgctgcatctgcaggtactttccgtaaacgattcgcactggacagcagccagctgattgtgcatctggctatcaacaaggctcggagggctaagtggaaatgacaggttgtattgaccacggacagaggggaagcacttgccgaggaaagggcgctgggtatggccgctccagatttgacgggaagacaactggcggccaccgcaaagcatactgtatagcccacaacttgaagctgagcgatatcgcaggacttgtagtccggcattcgtgcgacaatcctcggtgcataaatccggagcacctgctactagggactcctagcgataatatgcaggaccgaaataaaggtgcgcgtaatttgctgggcagccgcaaccctgctgccagacttaccccagaagacgtgcacagcatacgagaagcatacgctggcggtgagacccagatatctatagcgagacgcttcgggacaagtcaaggatacatatctaatatcataaaggggagggtatggaatgagcagaagcatcctgataacggattatgagacgcaaaaccacccatattacggtagtgttgcttccccgtactgtccggataattacatcgtagaatcagcgtggcgtattgaccgcacgcacgatgacggtacggtagaagtaggccccgtagagagtgtacggtataacagtcgcgcgcactttgaagcggcacctgtatcagaatggctcccaataccagctgactgttggctgattgtggctcacaacgccgcatatgagattagctggttcctaacctttgcgcgcgccgagtttgaggccttcctaaagcggggaggtcgcgtattctgtacgatgcattctgaatacatcgcctcggactttcagagcatgtatccgtcgctggacgagacggctcctaagtacggtggtacgcacaaagtagacggggttaagcttctgtgggagcagggtgtgctaacctcccagattgacccgatgctactgcacgactacctggttaacggggacatcccgaacacggccctgtgcttctacggccagtgcgctacgttcgcccagcgcaatcagatgcagtacgtgtgggagcgcatggatgccttgctggcttgggcgtactgcgaatggttcggcctgttcgtgaatatgccgattgctcgcaagaaccaagaagagcaggagcagcgcatcctggagattaagcaggagctgcagcagtacatcccgaaggacttgccggagacgctggatttcaacttcggttcggacttccatatgtctgcactggtgtacggcggacctatcaagtaccgcaagaaggttccatatttccccccgcagtatgtcaaggcagactattggcaagtcggggacacttgggttgccgtggacgacatgcccgcgccacccggtgcaaccacgtacaagtccggtaagaacaaggggctgccaaaagtattccgccttgatacagaggaggagaaacttaagtgggaggatgacctttacttctgtccgggcctagtggacatccaggagcttccggaagttatccgggagaagtacgcagagcgcggagagttccggcaggcgcgtaccctgcatgacggcacgccagtatacagcaccagcactgacgcaatggaggcactggctcgccaagggttcgagttctgtaagttggtaaacgagctggcggcgcttgagaaggacactggtacttactatttgcgggaagttctggatgcaaacggagaagtcaaagagcggaagggaatgctacagtacgtaatccctgaacgtcctgatggttccggaatcatacaccaccgcctgaatacctgtgccaccgtaaccgggcgccttagtagttctaacccgaacctgcagaacctaccccgcccggatgaggacggggatggggtggctaaatccaaggtgaagcaggtattcaccagccgattcggtgataacggccgcatcactgaggttgactactctgcgctggaagtggttatgtcctgcgtgcatacaggggataagaaactgctgggcctgctacaggcaggtacggatatgcactgttaccgcctagctttccgtgaaggattaccgtatgaagaagtatatgagcgctgccacaacaagaagcacgagctgcatccgctttggaaggcaatgcgtacaagtattaaggctcctagctttgcagcccagtatggcgctacggctaaggggattgcgtttgctactggatgtacggtggaatttgcacaggctttcttggacaacgaggctgcgctgttcccgcaaacaattggcttccgcgctgttgttaaggaagaggtagagcgtaccggtgcggagggtcgcatgtaccgggagcaggcggacgacggcagctatcgaatctaccgcattgggacgtggaccagccctgctggtgcccgctacagcttccgtcagaaagagcagtggaaggaggttgtgcctgggcagcgtaagcagaaggtcatggactacaaggaaaccgagatggcgaactactggtgccaaggggaagcattcttcctgatggcggtggcggctggtatggttctgcgtgcactcttggcccgtgactggttcgacaatcaggtgtgcctgattacgaacgtgcacgatgcgctgtacctggacagcgccaacccagaggttggacgtgaggcgagcttgctggttaagcagtgcatggaggacgcacctaagcgtatccaccagctctggcctaactacggtatcattggtgaggtcccgttcccagcagaggctgagatgggtacgagtatgtacagtaaggagaaggtagaatgagtataaagtcaggcagtgttgtggagttgatggatcttgggcctgagccgatagacccgaggtatgcagcatacttcaccccaggtacaaggcacacggttatattcttcgacccggttactggtgagatagaactaagttaccctggactgttagtaagtaggcccggggacggcgtcaccttcttccccggggagtacaagcttatcgaagagtagtgataggtgtacccttgggtggtgtagggggttagggtagcatggaaatatgctagggtcaactaaataattaaataaaattatttgttgactttggcttgattctgtgattcccctagaattaatgtgatacgagtaggaacaacacaagagaggcaataatggcacgtgttagcctaataaaactattcaccaaagagcagcaccaggcaatcctgggccagtacctagacaacgctctggctgctcagtactacaaccaagagctggataatcgcggggatgtggacacggacattagtgtatctcgtcagcttgtgcgctattggcgcagcatcttcatggataacaagggcagcaaggcaagggctaataatgctttgatgcaagcccgcaaactaatccagccctccccaacggatgacattggggatacgtttgtaccggaaacctgtcgacgtattctcgttatcggggacctgcacgagccgtacacacatccggacgcgtacgactttttgcgcactgtacgggacgagtactgcccagacattgttgtgcagataggcgatgagacggatgggcacgccattagctttcacgacagcagtccggagttggatagtgctggggtggagttagagaaggccaagcttggcctggagcggctgcataacctgtttcctaacctgctcctgtgcgactctaaccacggctctcttgtctaccgcagagccaaagctcatggactccctgtacagttcattaagaagtaccgggacatcctgttcccagagcatggggcccccgggtggagttggggcgatgcttgggatttgaatactccactgggtattgtgcgattccaacatcaagtatctggggaccttctgctcaacgcagcccatgaacgtaagtccatggtgattggacacttccatgggaagttagatatacagtatgccgctagcagcactgccctgtactttggtgcgcactgcggttgtttaatcgacaacaagagtctggcctttgcttatggtaagttgtcaagaagcaagccgattctagggtgtatggtgattacagatggatgcccgcaaatcatccccatgttacttgacgattccgggaaatgggtagggagaagcaaatgaatttgctagacgcaaccgtcacccgagtgggtgcgcccgtatgggatgagcaataccaggtgtatcgtgtaaccctggagtatgactgctgggggcacaaatctgagacagagcggtggtataaagatgaatcctcagctctgagtttaaaagttggcgacataatcaaaacctaattaggggtaccaatgaaaatgggaatctgttctgtactgggtcttatctttataaccttgaaactgaccggggttatcgcctggtcctggctgtgggtgctgcttccgttctacggcggtgtagctttgctgttggcaatcctggcggcaggcggtgtggcggcagccgcggctgcaggcattaagtccgcacttaagaatcgctaggcctgtcctgcatctgcacgtaaatatcatttgaactaaacgagagggtatatgcacgctacttctctgccgcaatatttgcggtatgaccccgaatcggggaaattgcataggcctgacggttccgaggctgtgggttacattaaggatggttacagggtagtaagtgtgaagggtaggcaatactttgcacatcgactggccttcgccttaatgtgcggacgttggccgaacgttatagaccacgtaaacagaaaccgtacagataatcggtgggtcaatttaagggaggccaataaagcagtaaacgcgaagaatgcaggattgcggaaggattcccggtcggggtatcgtggagtgtcttatcgtaaaagcaatggtaagtggcgtgcctacatacaaacagatggggtacaataccacctaggattctacgctaccgcagaagaggcccacttagcaaggcaggcagttatctctcagcatcacaaacacttttctaacgaggtataaattatatgactactaatgtactggcatccttgaacgctctggtagacgcagcaatcgaaacccaagatgtagatatgcgggaaacctcacagggcggtgcgtatgaggatgtactgcttccgaagggcgaatactacggctacttcgccgagtacgtagaaatcggtaagcgcctaccaactaagggcggtaagcctactggtaagcctgcagtggctaacgtgcgcatcggtattgtggtgtacggtcctaacggtgaagtgaagcgtatccgcccgtacccgatggctatcagtaactttgagcgagcaggcttcaagaagttcttcgacaagctcaactacgacaatagcattaagcatgcagcacagcgtctggggcaggccttcaccttcccgattgatgagcacaccagtgctgcgggcaagaagtctaacatcgtggacctgtccggtatccgcccgattccgaagttcgacccgaacaccggcgagcctatcaagatgccagccctggatgcctctgagattaagctgttcctgtggaacaacccaaccaaagagacctgggacagcctacacatcgaaggcaccttcgacgacggtaagagcaagaactggattcaggaggatatgtacaaggccgtagacttcccgggcagtgctctggatattatgctgaacgctggctctgttccgagtccggcagctatgcaggcacctgctgctccttctgcaccggcggctcccgctgcaccgcaagcacctgcagccccagctgctccagtggctcctgcggctcctgtagcgcccgctgcgcctgctgcacctcaagcctaatctaccctaacctaaactaatatggccccgcatggggccttagaggaagactatgaacatcatcaacattctcatcaaactcctgagtgcagcctacacagcagaagctaaacgagcagatgccaaagcgcagtttaacgagcagctgtcagttaaattcgcagacgacgcagtacgtctggccgctcaatccgaggcgcgagtagaggcctccaagcacagcaaagaggtagcagaagcgcatgcttgtcatgctgataacctgcgtgccaagcgtgacgaagtagctaacttcctgggggtataaatgcgcataatcacatgggccaaagaacagtacgctgtgtttctgcttctgcgcgcacagcgtttgcagaagcgagcagacgactggcgctgggcagctagctctcacgcatacagggcaagccttctgggtcccgagattagtgcgcagcgttatcacttgaatcgccagtgcgccaagtcccggcgccgtgcatacgccctgggcgcagaggccacggccactgagaccaaagcctacgccttcattcaaaaacacaaactgaaaggatttgactaatggataaagtattagaagcgtacgagaaccttgccattacggtcggctcagcggtatacgatgcagcggcgtatggggtgcttaatattagtctggacgacatctacaacgcactagatgagctggcggccctgtacggaatggacctggacctggccgctacagccttccgggagcacaacgatctggcggcacatgccgataagttacgaggagacgaccttgtacttatccgcgtagtgggcacgctcagcgttggcctggcggagattggctcctgtatctacgacgtagaccagagcctgcgtactccggaagtaatcggggacatgctcggcaccgtgctggtgctgtctgaactggaggcttaagtatgttgtacgtatctcgcgcaatttacgtagctttgattctcccgctgattccattggcgggactgtgctaccttggcgataagctgagcaaggcaaagtgggcagaacgttgggttaactgggccgacaagaaggcccgcgatattacggggcgctgatgattatcaacggggttgacttgtcccagcttagcgagcagttagctccgcagaactctgggaagattctgctgtacgatgcggatttttgcgtgtacaaagccgccgctacagtaaaacgtttggataccgcaatacgccgcttctatcagctggtgcttgaggacatgttcctggtcggctgctcagaggcagtggcgtacctgacgcctgcaggatgtgctaagtgcttgcgctggcacctgcctacggctaagccctatcaggggcagcgcgctaatcgacaggagctaccgctcaaggcaccgttgaagcggcacctgattgagaacccagaccagtattctgagcagggtattcaggtagtcagcagtgactacttcgaggccgacgacctctttgtaatggattcgtacagcttcggagaccggggaatcctgatgtcccaggacaaggattcttggctcagccctatggctcggttcgatatactgacaggtacagtgtggcctgcactggaggacccattcggatggattaagtgggatgacacccaggctatgcctgtacgagcacacgggttgaagttcttctggtggcagatgctagcaggggacgacgcagataacgtcaaaggcatcacgttgcttgatgggaagccctgtggcaagcgaacggcctttgatgctatctaccctattacctcagagcaggacgccgcagaattcgtcgtagcggcttacgctcgaaacaaccaagacgtactcgcagaggcagaatgcctgttcctgcggcgctccccgtcagattctgcctatcagtatctgatgtcactgttgactactcccagtctgcgtgactgggtgcattcgctgcacgagtaccataaacagcatatacagtggatacaggagcacccagacaatggcgaagatgtctgcgaaggaaatgagcctgcgggcgattgagttatactacgaggggaaacacgatgaacttgaaactattctggatgcgctgcgtgaacgagcacccaaaacacatcgaagaacggttgagcatttggattctctcattcacgacaatgctatgctggatgtagttggggggattgaggtatggtaatgagtacaccttgtatagaccatgggagaaaggggcggccaaagactgggttcctatccgcgtgggtgcttattgacggtaaacgccaacctacaaccgcacacaggaaggcgtactatgaacacacaggagagtggcccgaagtagtacagcacacctgtggaaattctcgctgcattaaccctgagcacctgcatggagggacccacaaaagcaaatcagcaaagggttccagcagcggccgctcacgtttgaacgaaggtacggtgcgctatctgcggcaaatgcacattcctggggaccgggaatggggtagcaacgctatagctagacgcctgggtatggctcaaagtacggtatatcatatgttaagagggatttcatggcgctgcgtaaaataactcgagcacagattcgctctgtggctattaagcttgccaaagaccagggaggtatatgcctcctctgcggcaaacctttggacttcacaatcaagggggtaactggtgattctgttgtcgttgaccactgtcatattactgggcgtattcggggtgctcttcatcgctcgtgcaatggaggagaaggcaaagtggcatctgccgctgggcgctggattgttggtagcatgcaatcttctggggctattgctgaatctctacgtagggtcgccgattacttagaccgagaacctacggatatgctatactatacgcacaagacgccggaagaactagcacaagcacagaagctcaaggcccgcaaggcccgggcacgacgcaaagcacgggagactattaaatgattgaatccactaaattctatgcaggtgatttggttgtgcgcaaagcgagtcacgtagggggtatctggaaggacatctgtgaacagctacaggtagacctagactcccccagattagtgacgtgcgcagaagacggacttataaccttagccgagtgtgggacctcttggcgagcggagttcttccagctcttccattcgaagagcgaggctgtttctgactcagtgaactctcctcggcactaccagttcttcccggacctggaggcaattgaggtgattgcacgcagtatgacgaaagagcagttctacggatactgcctggggaaccggctcaagtacagactgcgcgccgggaacaaggataagctggagcaggacattgccaagtccgacaagtactcagaactgtacgagcaacaccgaggtaagtgcattgacgcctagcgcatggtgccacgggatgtggcagaaagcagtagaacggggcgacgaaagctccgctaaagactatctggagatgtacaatctctgggtgagtcgcaatcagtagttagaagtaccggacataaccaaggagactaagcgcctatgattagcgccctgaatacggttgtagtacccgaggaagcactggtgaagcgccagctggagcttgaagagacctataagattcgcggaatcgagcgggcacgtaagctgattacggacgcactgcagaatggcgggattatgaacctgccgatgacgcagcgtatgctcacctcggcatatgaggtggctgctgccgctatcgatgagatgcgaaatgtcaaagccccgggcattggtggtaagtaccgacggttcctgcgcttagtccccttggacgtcctgaccactctgagcctgtgcacaatgtttgaggcgttcagcgtcgcccctggcgagtccgccagtcgccgtcagactgcacaggcggtaatgtccgcactgggcagaaacgtacagtcagagctactggctctgcagttacgcaacgtagcccctgcgtacatggaccgtgtgtatgagtacctcacagagcgccgtacgaagtcccctacgcacatcctacgtacgctccgcgccagtgccgagaacgtgcactatgggcacgagccttggaccaatgcccagaacatctccgtagggcgtctgctgtgtgccgcggtgtttgagacgggcctgttccagtggaagaactgtagcgggaatctgagcatgctctacccggctgacgacgttatggaggccttccagaaactggtagagtccgctgacactgtaaccatgaagccgcctatgctggtaccgccggtgcagcacactactctgtgggatggtggatacctcacccctatcgacaatcgcgggacctatcataactcgcacattgacagagctcgtctccgtgaagtagcggaagcatttaagtccgcggatggcattaaaaaagcgcttaataaggcacaggaaaccccgtaccgtattaataagcgcatactggaactggtgcaagaagcacgggccatgggtgttgggataggcatgccgcgctcagtaccggagccgaaaccggagtggtacttggatggtgttccaaaagagaactacacagaggaagagcttgaccgttttggtgagtggaagacgcgcatgtccctgtggtacagcgcagaccgtaagcgtgtgtcgcaactgcgcagccttttgactacgttagaaatggcagaggaattcaaagatgagaaagctctgtacttcccaacctgcgtggattggcggtaccggttgtacttcaagtcctcgctgcaccctcaaggttctgatttgcagaaagcccttcttgagtttggcagaggaaaacctctgggtgatcgcggcttattctggctcaaggtgcatgtcgccacatgctttggttatgacaagaccttattcgaagaccgcgcagcttgggttgatgcgaactttgcagagattgagcagcttacagtttcaccgtttgattgccctgctttcacctccgcggacagcccttggtgcctattggccgccgctatcgacctggttaatgctgtgcgttctggatgcccagaagagcatattagccgaatcccagttgctatggacgctacaaactcaggtgggcagcatctctcagcgctcctgagagaccctgtgggcgggcgtctgacgaacctgtactgggagggtaactataagaaagctgacctgtacatggacgtgaagcgccgtacggacgagaaggtgatactggacctggacaaggaggatttcgttatccagagcacgtactggagagagaacgaaatcacccgcagtatgaccaagcgccccagtatgacctatttctacagcgctacggtgcgcagctgcagcgactacatcttcgaaggtgcttgcgccgagggatacgagggtgccgagactaacagcctgtggaacctgtcgtgctacctggcgccgcgtatgcgtaccgctatcgaagaggcgaacccagctgctgcggcagttatggggtacttgcagaacctcgctagacgcgtaccggcaagccagcatctgcagtggtatacgccgctgggtgggcttgtaatgaaccgttacacgcagcgtgaagaagtgcgggtacgcattgactgcatgaacctcaccgtcatgcgggtgcataaccgggatttcaagacctgtaacaagcgcaaggcagcctctgggattgccccgaactttgtgcatagcctggacagtacgcacttgatgatggttctgtgtgccgcggaagggttggacatcgtgcctattcacgactcgctggctacacatgcagctgacgttgacgctatgcaccgacacatccgcgagcagtttgtgagcctatacgaagagcacgacctgcttggggatattactcgcgcggcagcagcagctggggcggacttgacggatttggatatgccagaagtaggttccctggacatccggcaagtgctggaatcgcctttcttcttctgctgataaatgaagttaccggagtaggaatgaagttaaaacacaccagtaaaacttccgattacactctcaaggttctgtataagtctgacgacattacagacgcagtgaagcaactgcacgaactgggccacggcattagtcggggcctggctccagagcagcactactggagagtgctgggaagtatattgggtaaacagtatatactaggagtctatgactcccaaggcggattagtcggtgctgtcagctactatccagaagctgtggaggactgtcattacgtagagcctgtgctgtatacagacttcttcgtactaaaaccggacaatggtgcggcggtgactgtgattatgcaggggatgcacgcgatagccaagtgcatgcgcgccgggcgtattgccattagccggagcacatcggataacacgtacaagacaacttatcatttagtgaggtcagaatgagtggtggtttaggtaaactgttaggtaaggccacggatatgctcggccttactgacaacgcaggattagaggcacagcagcgcttggcagagcagcaggccagcgcagctaaacaacaggctgccttagaggctaatagcgccgcagataacattgctgagattgacccagcaggggctgcctctgcatctgcagatgcaattacgtctgagcagaagaaacggcgacaagcagggcagagcaatcctctgggcctgtaagggggtagcttggaacaaaaagcaacattagcagaactctttaagaaggaccaggacgcgggtgtcttggatgcctctgagaagtttgcgcagtggacgctcagcactatctttacccgggacgattccctggacggtagacgcaggcccctggagcgtgattaccagagcacaggggcgcagctggtcaacactgcagccactaagattgtaggcgcgctgttcccgcaaggcactagcttcttccggttctccaagagttcggacctggacgagttcattagttcgctgggcagtgctgctacggcagaatctaagttggccgaggtcgagaacacggcgtcacagaaagtatttgagaaagacggttatgctgcgaagttgcaggctgtgaagctgctgctggttacaggtaacgcgttggagtatattgatgagcggacaggtaaatccatcgtctattcagtccgtaactttaccgttcgaagggatggaagcggtaacgtcctgcgactcattatcagagagcgcgcaagcgtccaggacctgccagagagtttccggaacaccttctaccgtgacaaagacccatacggcgacgttgatatctacactgcctcttgtcgcaaagttaagcggacagaggacggtgcagaggtagtaagctacgaggtgtaccaagaagcagacgggcaccgcattggagacagcagcacctatccggagctggagcttccctacaacgtgctggtgtggaaccttgttagcggcgaacactacgggcgcggcttggtagaggactacgccggggacttcgccagattatcggtactgtcggaagcgttgactaactacgaggttgagtctgcgaggttaatcccgctgattgacgcaagctctgggttagacgtggacgagttcgcaacgtcggagactggcgaggctgtgcaggtgggcggcggcggttccaacgggaacagcaaatcccccgtcactgcttacgagggtggctctgcccagaagattcagtggattgccagcaacattcagatgctcgaacagaaactgtcgcgtgcgtttatgtacaccggtaactcccggcaaggtgagcgcgtcacggcttacgagattcgccagaatgccaaagaggcggaagccgctatgggtggcgggttcagtattctgagcgacacatggctgcgtaagctggcgtacctgtacactgcactggtatatcctcgctttaagctgtacctcagcgaaggtgtagtgagcatcaacgttacggtgggtacctctgcactggctaaagccgcagcagcggataagctgctagaggcagcgcagtccatgcaactggctatcccggtgctggagcagattactccacgcttcaacaaggatgcgtgcgtagactggtacttcgacgcctacggtatcgtcagcgagccgttcatgtacacagaagagcagctgcaacagaagcaagaagttcaagatgcgtctgccgatgtatccgcaggtgcagcacaggaccaactccagggcttgacagcagcagacccaacagtagcaggtaagcagctgggcttattaccaagttaacaacaggggcatagatggataacgtagaaaacggtcagaacgtagaaactacacaggtagagaaccaaggcggccctaagattccgggcctaggtgctccccttaacgccccgaacaatcaaggcgtgcaggatgcgcccgcacctacccagcagcaacagggcaaagattcccctgaacctgctaagattcctctggatatcgaagccctaaaagcagccctggataagggtggcgatagcgctaaggagcagccccaggagctggctcagacaggcaatccgacgattgacgccggggtagctatgttgaagcaagtatctgggttaactgactctgatatggtgcgggcacttggtaaggccctggagtatcaggaccctaacctaatcgatacggccttcattaaggaacgtttcggcgagcacgctgcttacgcagagctgttggctaaggcgtacctggaagaccaggttggacaagccaccaaggcagtgcaggaagcttacgatattgtgggcgggaaggagaactgggaggtagcagcacagctgtttaattccaaggctcctgaacctctgcgtaacgcagctcgtgtactcgctaacgctggtgagcttaagcaggccgctgagttggtagcgggcttctgccgggatatgggtcttatcaagacacagaacccaatggtacggggcgtagccagcaacaacgcattatctgctgcggacttccgtgcagaatataccaaactccgtcaggaagcgggcaaccgtagcttggcatctccgcagttcagtcaacgttataatgatttgctcgcacgccgtgaggctggtaagcgcgtaggtctttaattttatttataaaggaaactaaggcatggctaacactatttataatggcaacctgactcgtccgcactggggcggcgcggcgtctgacgtagacattcacctggaagtgtatcagaacgaagtggatacccgcttccagtaccaggctctattcctgggactctccagccagcgctctatcagcggttctaacacctaccgtattgaccgcttgaacacctcctcggtgaagggtcgtcgctccggcgaggcgctggatagcaccccggttcgtaacgataagatgattatcgtggtggatacggtgctgtatatccgtaacctgattgactaccaggatgactggaccggtccggacttcctaaccgagatgggccagaacaacggctctgagttcgcagagaccttcgaccaggcgcacctgattcagctcatcaagggccgttcctgggttgctccggcgcacctgaaaccggcgttcaacgacggtatagaggtaggcgcagctatcctggttccgggtaccactaccgccacgcagctgacccaggctgagatggaggctaacgccatgaacatcaacctggcgcacaaggctggtattgatgagctcatcaagcgcaagaccccgctggcggatatggtcactctggtggatgtcgatacctattcgcgtctgctggagcatccgaagctcctgaacatcgaattcggtccgtccaacaacgacggttacaaagaccgtcgtgtagtgaagatgaacggcgtacctgtagtagagtgcaccgagttcccgaccgaggctggtacgcatccgctgggctctgcttacactgtcaccgcagacgacgcgctgtgccgtatggtgactttcagcaagtccaagaccctggtgactgttgaagctaagccgttcacctcccgtatctgggacgatacgcgcgagttcagcaacgtactggactgctacgcgatgtacaacataggcctgcgtcgtccggacaccgctgcagtgactaagttcaccttcaccaccaagtcctaattggaggttcaatggcagtaatcgctacgttcggtctggagactctccaggccaatgcagctcagcgggaggcggttaaggccgccaccgatgtagcgaagaacatccaggtggcctcggtcgagtctggccgcaaggctaccaagaaaacccgtaaggcggctgatgcagccgctgatactgcggaagagtaatacgcgcccctggtgccttcgggtgccaggggcttttttttttgtccctgtcttaaaggtccaaggggtctttaatagaggaacaaatatgagagaattagacgctgtgaacctgacgctggaagccctgggggagtcccgcgttatggacatcaacactagtaaccctagcgctggattagctcgctctgcacttgcacgtaaccgtcgtgggttgctcagcacaggattctggtttaacgtggtcgagcgtgaagttacgcccaccaccgacggcctgattaaggtgccgtggaaccagctggctgtatatgacgcctgctcagaatccaagtacggggtacgtgacgggaacctatacgacctggtagagcagaaccaatacttcgatgcgcctgtgcgtattcgtgtggtactggatttggcctttgaggacctgccggagcacgccgctatgtgggtggctaactacaccactgcgcaggtatacttaaatgacctgggcggtgacagcaactacgctaattacgcacaggaagctgagcggtacaagagcatggtgctgcgcgagcatctgcgcaatcagaagttcagcaccagcaagacccgttttgcacgcagaatccgccgcgctcgttttatggtctaaggagaggttatggcgcaatcattagaaggtactattcagagcttgctgcagggcgtttcccagcaggttccgagagagcgccaaccaggacaactgggggcgcagctgaatatgctcagcgacccggtttccggtatccgccgtagaccgccgggtgagattgtatgggaaagcacaatcgataaccctgggcttgactccctgttcactgaatacgtcgagcgtggcactgacggtaggcacctgctgattaacaccagcaacggtaactggtggttgctggctaagaatggaaagaccatccttaattccggcaacgacccgtacttcgttaccaccgtaggccagacctctttgcagaccgcaagcattgccggactgacttatatcctgaatacggagatggctcctagcacaaccgtggacaatactgggcgtatcgaccccagcaccacggggttcttctacgttaagtctgcagcattccagaaacgctggaacgtcacagttacctccgcaggggtagactactcaggggactacaccgccccagctgctggcagcaccagcggtaacgctgaggaggtatcaggtgcctacgttgctcagcagctgcgggactctcttgtagctaatggcatgcccgccgggaacgtgagcgtacgcggtgcgtacctgttcttctatggactgagcaactgcgtggtgtcctctgacgccggtgatacttacgctggggtatccaaccagtcccgtgtagatcaggagcaggacctgcctgcacagctcccagcgcaagctgacggagcaatgtgccgtgtaggtacagcctcgtctgagacagcgtggtatcagttcagctacagcacccgcacctggtctgaggtgggggcgtacggcagcatcaccaagattacgaacatgcccagagaacttgccgcggatgacaatattattgcgcgggattgggaagggcgcttagcaggcaacgacgataacaacggtaatccggggttcgtcgagaatggctacattactggcattgcagctttccagggtcgcctggttctgcttagcggcagctctgtggatatgtccgcctcgggcctgtatcagcgcttctaccgctctactgtgacgtcactgctggatacggaccgtatcagtattagctctgcgtctgcgcaggattctgtgtaccgtaccgctgtacagtttaacagggacctggtcctgtttgctaacagcatgcaggccgttgtgccgggttcagcagtgctcacccccactaacgcaagtattagcattaccagcacctatgagtgcgatagtcgcgttactccggtcatggcagggcagacagtaatttacccgaacaagcgcaacgacagctacgcgggtattcttgagttgatcccatcgccgtatacttcatcgcagtatactacacaggattctacggtgcacttaccgcggtatatcccaggcagggtattgcagatgcaaaactccagtgtcaccaatatggccttctcgcgcatgtctggggagcgtagtagcttgctggtctacgagttcatgtggggcggaagtgacggcgctaagatgcaggcggcgtggcataagtggtcgttcccgtatccaatcctgagcgtacaagcgctggaggatgaagtgttcttgtacatgcaagggcccagtcccagcaacaagcttttgattgtgtctatggacccgcgtgaaggttaccagctgggttcggagtatcgcgaagcgtactcggatttgcagaagcaagttcaagtacaggacggggtattcaccgttccggcagtactgcgtccagttgggtgggctgaccgctatgaggaagagcttatcctaacttacttgcccagtaaccctatgggacctactgaggttggcataaaggagattgccggggagaacaccctgcgggttgtacgcggtgtacctgatggcacctacgtaatcgggaggcgttaccgcagtacgttcacgctaactacacctattctgcgggaccagaatgacaagctcgtggggagtgggcacgtgcgcctgctgcgcctggatgtggcggtacgtaactctgggcacttcgatgtgcaggtactagacaccccacgggatgtcaactggggcggggaactgacaggtatcctgatgaactcaaaagagctgacgctcgggcaggtcctgcgtatggacctggctacgattaccgtgccatgccgtactaacgcagacacaaccgaggtgtcattatttactgagggttctatggaactgaatgtgctggatatctcgtacatcctgcgctacaaccaacgcagacggagaatttaatatgtggtggatggttgcggccatggccgctaagaccgttctggggcatggtgctcagattgaagtgtccaaggccaggaacaaggctgtgattcaacagacagccaaacagctaaacgacatcgcgctacagcgagcccagtccagggaccggactgaggtatctctgtttaacatccagcagcagaagctgcaggcacagagccaagtagggctgcaggcagcagcttccggtactatgggggcctctgttaaagacgccgtagccacagtgaacactgtagccggacgacaagaggccagcgtgcgtgaccagcaggcaactcaggaagagggtttccgtctaatgacggacaaggccgtggacagcggcctggctaacatggacatggaggacccctacgataacatgtttaactcgttgttgagtgtcggggcatctgccgttgggcagtacgctggtaacgctgcgtcgtctactgactctggtagctcaacacccggaagtggtgcagcagctactcagaacatggcgtcctcctatgatttatgggggagcaaaggtaacagctcagttcacacctggtaacttaagaggaatgtcaaatgcctgtgattcaacccagtagacaggggttaagtatcggaggagtgcaactgcagtccaacgatgttagcttaccgtcaacggtaagtgaggtgtctgttgatacctccaaagcaaaacgcctagctgccctgtcagggttcgtgcaggacttcggcgtagggtttgacgaagcagtaaaagaaaacgctgcagccgcaacggtgcgcggcgcaatggatgcccagggcgcagtagatgcaatggcttccaaagatgaggctgtacagaagcagaacatcttcgtacgcgaggcctatcaggatggctacgtatccgccgccgcgtacgactctctagccaagtggcgcacagatagcatcgcacgagctaagaaagctgctgagtctggtctgactgacgaggaattccagcagcaggagcaagagcacgtacagtcaatggcagacaagctcgggatgtatctcccggacatgtccaaacagtctgccacgaatatactgcagcagctccgtgctaccagcatggcgaactacacagccttccagaaaggcagagctgcgtttgccctggcgcaggctgaccgtgcactcgaccgcggccttagctcgtccagtgatgagttctatcagcgcctgcaggcgggacagggtgccgctgcgcagatgtctatcaagaccggtttagatagcatactggctgctgagcacttggataagagcaagaagctggaccgggccaagcagtatctggtcagcgtggcgcagcagacgcaggacccgatggtaataaaccagctgcaagagttagctaccaaggaactcggggttaactcagtggacgtcaacgcggcactgtatcaggagttcaagcgcgcaggtgctcagattgagacccaagcccgtttcgaaatctccgatgcaatccagtctcttgaagggcagactcctgagcagcaagagcagactatgcagcgtatccgtggtcgaatcattgagcagtcaaccaatggggtgctcagcgctggggccagcatggagttctggaacaaggcccagaccattcgcgagaaggcagcggacacccaggcattgcgcacagcaattactggaaacatgccaagctccaccctggcggggatgtacaagggcgacctgggtaaggcgcgcaacgagctgctcaaaagctttccggacaccccggaagggaacctgcagctgctggcatacgggagcaacagcaaggatgcgtgggcagtcaacgaagcgcacaagcgtatgtcttcggatatggcacgtacgctgactacgctggaccagctcggtgaggatggtgaggtttcccgcgagaacgtaaatagcatcaacttatgggcacaggcttatagcaccagtacggacttagggaagatggcgctgctgtctgaggtcccatctgagtggcgtggagtggtgcagaaagctgttacacaaaacccaaataatgccagtaacactatcttggacgaccttcgccgccaggcacgcaataaggccagtgggcgctacagcaatatccagagtaaccccacggacaagatggtggacccaagtggcacggccaactggtttagcttcttcggggatgcagatgcccagcgccaggaagctcgcgctgctatggaagaggagtaccgttatatgtataatcacaacccggaatcccttgtagggaaggacgctgacgacatcaatacgatgctaaaaggcaatatccaatcccgtaagttagagctggacattgctggggcacctaggcatgtgtatctgcccgcgggcacctctgtgcaatctatcatgggtgattataagggcgaccaagagcaattcaaggcctccctgcagcagcatatacagaaccaggttcagtatatgtcagaccacagcaacatagagcgtgtagtagtgcaggccgccactgcgggcaacgcaggtcagaacatgaccgtaaccgtgttcgacaagaagggcaccttccagacgatgtctgtgaaccttcgagacgttcagacgactgcgcaggctgcgtacgattcggcactggctggagatatgaagattggcagtgagcaagtaggagtgcgtcccgccaccttctacgaccacgacaacgggcgtgctgtcagcgtacaggtcaacggccgtaactcggtagggctggagccgtcgctgtttagcgacattctcgctaccactatgaagttcgaagggttccgggaaggcaaaggcaagggtagtgtaggtttcggtctgcacgttaactcgggcatgcccgtcccacagaaagtgaccattgacgacggtgtcggtatcctcaaatcctcactggagaagcagtacataccgaacgtgcagaagcaactcaagggacagggtttgactgcctccgacgaggcgttaaaggtcatggtggacctgaactatcacggcggtaacggtagctctggccccgtagcagaggcgatggcacaggtgcgcaaggctgctaagtccccggtgggggcgtatcagtaccctgtatctgaggcccagggtagggcttggcaagcgctgcggaataccgctgcgtacaagcaggcccaacctgagcgtaagaagtacctggaacaaaacctacgtgattggctctttgaagcaacgcactaaccagaggcccttcggggcctccccttatcaaaattcttttaggagatattatggctcagtttctgaaccgagaaccgaatccacaggaaaaggattctgctaagggcgcaacaattaaacctgcgcctgggcgcgtagattggaatgatgctggagataacggcctgaacgcgctggagcgtgcctccttactggcgcaggccaagaccccagctactacagccgcagagagctttgcatcgggtatgggcaacagcatcatcgctgcggctatacgtaaggcctctgctccggcatttgaccgagacctgaactttaatgccaagcagaccctgagtagcgacacccgagctaagctgtacgccccaaatcaggaagagattgagtacctacacgactcggtgtcggtcgaagattataactaccgcatgcagcagatgcttgagcagcgtgaccgtgaccgcttaatggctgacaacacagtggctgggttcgcgggtatgttggtaggcgactccccgttcatactggccctgatgcctgccgccggtattgctggccgcgcgggcttagctgcacgtaccgccatacgcgctgctgatgtaggtactgcattctatgcacaggaccaactgggccagtccgccgcggtaactgcactgatagcgggcgtagctgggttagaccagctctgggatatgtctagggctgctaaagctgccgctaaggctcgtactgggcgtgagcctatgttcgacccagaagcgcctacaactcgtacagcgagggatgctaatgttaccggagtaggagagggagaggaaattctcactaagacactggatgaaagcatcctagtatcgagaaacaataccgcctccgtgaacatgaaagcacagcacgtagttcagttcttgaagaagtctgaacacttgacagcaggccagaaggctattctggacacgctgggtgatgctgtaaacgacattgattttaaactggtagcaggctccgcaaaccgcagccgctacacttacgcacaacaagatttagctaggcgcggggaggtatctctacgcgcacctaagcgagctaatggcagcacctggactacagccggggacgcactgcgcgctatggatgcagacaccagcaaggtggccgtgcacgaactgattcatgccgccactgcgcgcgccgttgacagtaatcccgagattgctaagcgcctggaggaagtgcgcgctgttattgcagcagactccaccttgacgccgcgtatgcggtattacgcaagcaatgtgcacgagatgctggcaggcttaggcgacagccctgagtgggttgagcatctggcgcggacgaaatccccaaccggtaagagcatgctccgccaactgggtgagtacatcatgaacgccctgggcatcaaggccaaaggctctgccttggaggacgtcctggatgcgtatgaggacgccgttaagtggacagctaaggactacgcagaccaagcccagagcttccgtagcgaagccttccaggacctggcgggcagcactaccctcaacgaggctaagggtgcccaagctatgctggacggcgctaagaagaagctctccactatgtttgccctgtacgataacatcgcccaaggcaacgaagacttggctaagctgctagtgtcggatgcgtccgccgtagggggtcgtcgcccgtccgtagtggacttcaaacgcaaccttactttggagatggacgccagcgccagcgtagtggaagacgctatcctgggtgcgttgaaggataagggtgtaggtttctctgagcgcttcttccatcggagcaagttccgcgctgagcgggctgcactggaagaccgcctgagcaagtacctggatgctgcctacagtgctgatgtaaatggccgcgctgtgccggtgccggatgcagagattgctccactggttgacgcctatcgccgctctggctgggctagcaagtggcacgagcatatgctcaatgcaggtctagtggatgatggtgcgttggttaaatccgactactacttcccgcgtcagtacagctatgacaagatgcgtcaaggtatcgcacagggtaacactctggacgactaccgcgccctgttccggtccgccctgcgggacgtgtacccgagcatggagtcagaggtagtgcagcgtgttgccaaggagatggttgacggtatctataatggccgcgccgggcagtctggccctatgtggaagcagctgattaacggtatgggtaacgacgaggtcgttatggctatgcgtagcgctggtgtagatgagtctgcaatccagagtttcctggctggtaacgtacgcgaatccggtagcacatcccctgcgcggaatctgcgtcagcgtactcggttcaacatggacaaagagtatctggtgaacggtaagagcatgcgcatgcaggacctggtggatactgatgtagccaaggttatgcacgggtacactaaccgtatgtctgggcgtgtaggcatggcctatgcaggcgtacaggacctgggacagctcgctaagatgattgatgagtctaagcgcgcgctagcggattccgctaagtgggagaagaccgtcaatgacaccatcgactttatcctgggtggggcacctgctgacgctggacagcttccggatttgctgcgtgcagccgggaacatggctaacgccaccatgcttaagaactccggcctatatcagctgactgatactgctttggccatgaaggagttcggtatggctagagtgctgcgcagtatgcgtgaccagccttggttcaaggaaggtgccgtagctatcgagactccggatatggctgcccgtctagacactgtgctgcgtggtaatatccagaaggagatgcgcttccgctggttgaatacgtacgccgacgataacctggacctgacccgtcaggcctcctggttcaacgtcactcagaacgttgggcaggctgcacgtcacgtcaacggaatgagtatggtgcaccggctgcaggttaacctgaactccggcattgtggcggatgagcttacgcagatgttcaagggcgatgctgaggcgtttaagcgtctggagcgtttcgggcttacccgtgacgttgcggaccgcgctatcgctgccaacaaggctaacccgggcgccatgttccagccggacctgcagatgcaagttgaggttgtagggacgcgtatgatggactacctggtacagcagattcgtaccggcgagacctcgcactttgcgcagttcaatcctatcggcaaagtcattgtagggtaccagagcttcgcactggctgccactaacaagattctgcgtagagagctgaacgatgctgggtggattggtgtggcccacattatggcgtaccagttcccgttgatgctgctggctactatggccaagcatggcatggacggaaaggatgtagacacccagaaactcatcagtgaatccgtaacaggtatgagtgccatcggcggggtatccttactgcaggatattttcctgggagattctcctcgtcactcgttggcatctatgggttacgtcacagggctgctcggggccgtacaggacctggctaccggtaatatggatatcaagaccttcactaagcaggtaccgctaatccaggaattcgcacctacgcgagctatcatcaataacttcggagacgattaatatggcgttcagctggcaagagtcggtaaagcctgcaggtactcaggatatccagtgcgatatcgagtacctggataagtcctatattcacgtttacttagatggtgctgagactactgccttcacttggaccagctccaccaatattcgtctgaactcgccactgtctgcagagacaggggtgctcctaattcgtaagactgaacgagagtatctttacattgaattctctagcggtgctccgtttattgaaggcaacgtagatacccagaatacgcagttcctgcacctggctcaagagctagttgaggggcgttctattgagggcttctacggcgatatcagtatgcacggatatcgaatcacccacctaggagacccagtggacactgcggacgccactaacaagggttacgtcgattccggcgacgcccgtctggaccaaagggtggatgcggaagaggctgctagaaagtctgccgacgctatcctggatacccgagtaactaatctagagcaggcctttatatccgacagggtcactgtaagctacccttggtttacagtactggatacccccacagacaccgtgacgccgcccatcgcttttagtaaggccatagttgagctgaatgggcagggccaaatccccggctacagctttgtggtagtgggaaattcgttgctgtttgcggagacgctaccggccggtacgctcgtggcggctaggctgggcgcagatgtagaggcgggcgatgggtatgtaacccaggcagcttttgacaactggctggcctcagtaggcgaactggcgtacaagggcccggcaaacgctgtggcggatagtaccgacaccagcaacgttgccacccagctaaacgccctgttagcggagctgagaagtgctgggattatcaaaacttaaataattactggaggcacaatggcaggggcggctaaacgcagtcgcctctcggagctgcaccgcatgttcactgaggccttgattgaagaaatcaagcagtctaaggaagacgaggtgccgctccccgccgcagataaatcggttatcgccaagttcttgaaggacaacgacatcaccgcggatgcagattccgaggagatgcaggaccttcgtgacgagttcgatgatgaactagcggcgcgtagagaggcgcgtaagcaagaaattctaaataaagttggtggttcagactctgaggacttactagaaggaattgtctaatggtatcggtgaagaccgcgcgaagactgcgcatgctcaaccagaaacttactggttatagtgcgaatccgcgcagtattcccaaagaggagcgcgaggacatcgcgatgatgatggccgcggcgctaagtgacttccgggaattcgcatacataggtatgcggttcctgggttttacattgacggacatgcaggccgacattgcagagtacatgcagaagggccctaggaagcgcatggtggccgcacagcgtggtgaggctaagtctacactagctgcactgtacgccgtctggaggctcatccaggaccaatcctgtcgtatcctgattgtgtccggtgcagagaagcaggcctctgacgtagcgaacttaatcattcgtatgctagaaacctggcctctactgtgctacttaaaggccgaccctactcgtggggaccgtacttcattcgaaggctacgatgtcaactgcgacctgaaaccgctggataaatccgccagcgtagcctgtgtaggtatcactgcatccctgcaggggaagcgcgcggacctgctgattccggatgatatcgagaccactaagaacggtttaacgcaaacccagcgtgagcagctgctgatgatttctaaagacttcgcagctatctgtacgcacggggatacgctgtacctgggcacaccgcagaccaaggacagtatctataaaaccctgccgggacgcggcttcgaggtccgcgtgtggcccgggcgcattccgtctgttgaaatgggtgagcgatatggaagtacacttgctccttatatcctggagcttattgagcgcggctataaacgcaccggcttcggcgtcgacgggacgctaggcgagagcacggacaccggacgctatgacgaggatgcactgattgagaaggagctggacttcggtccggaaggcttccagctgcagtacatgctcgacactacgctgtccgaccaaatgcgtacgcgcatcaagctttcggatatgctggtttactctggtagccaggattcctcccctgagacgttctcctacatcgcggaccgccggtacctgtaccagcatgagcatgaggggattatgggccagcagatgtacttcccggcattctacggggacatgcacctgccgtaccagcataaggtgctggtggtggacccggctgggtgtggcggggacgaagtgtcttacgctgctggtggtgctgcgaactcgtacatccacctattctccgtaggcggcttccaaggaggtatcagcgaagagaacattgataaactgattgacctatgcgtagagttagatatcccggatatggttgtggagagcaacatggggcacggtaccgtgtctatgcttatcctgaaccgtctgcgggagcggcgtctcgccggtattggcgtaagggacctgaataactccacgcagaaagagcgtcgtatcattgacacaatcagcccagttactcgtcggcaccgcctggtagtgcacgagcgtgctatccacgacgacattagtacctgtatggcatactcccgcgatagacgttggctgtactccgcgttcgcgcagttgtccggcatcacgtacgaccgcggtagcctagctaaggacgaccgagcagacgtaatcgctatgatggtggctacgctgaacgggcacctggtggaagatgagaaagtggtggctgagcgtgagtctgagaagatggctcgggccttcattgagaacccgctggattgggcacagagcaaagtgtctaagggccttcggggtgtggctgctaggttgcagaaccgtggcagaggtaaacaacatagaggaagaagataatggcatttgcagaagcaacactggcacagcgccaggcagtacgtaatgcggcagtggcgcttgataaagcaacaaccttggcgcatgataccggcccactagatactctgggtcctgatgcagatgcagcaggggctgtagcagtggcggcactctctgctgcaggagcctctgacggtggtgctgtagtggtggttggtaacggcgcagaagtaactgcacctattacgttcaccaccgctcgggaggcgggggctaccgctactgtagcagcaactatcactgtagaagatggtgtaatcacagcaatctctgttgagtaaggagcaatactatggcaattgcaaaagcaaccccagcgcaacagcaggagctgctgcgccagctgaacattctcggtaaggacctgtatgctatgcttacgcagccgcaggacgtggcccagacgggtgctaccttcgataccaagattgctgcgctagaagccgcggtagccgcagtgaaggctgctagctaatgcgtaaactggtcgctgggttactgctcgcggttactctgactggttgctcggcgacctctgcactcaccggcttagttggttctaagccggatgtatctgctcaggttggtgccgaaaacaccaagcaaaccgttggcttgaataacaaggtggactccagcaccaccaacaaaaccgatgtatcagattctaacgtaggcactttggacacgtccagtaaggagcaggtgcaaactattagcaccggtacaatccaggcagggcgcctgcaggtggttaacaatgatagttacagtcttatcctcgccggattagctggggccagcattcctctggtcttcctagtggtcattctggtgattcgtaagctgttcaggaagaaggagcagcaggatgattaaggtaggggacgtagttggggcagacctcgctacccgggcaggtgcggcagttaccggcgctacggtatcaggaggttggttggcagagttaatgagctggaactggagcactatcagcttcatcactgcgacggtgtgcgcggtgctaaccctggcgtggaatgcgtattacaagagacgtacattcaagctcctagaggagcaggcacgtaaggggactattaaatatgagtttaaggactaaggttattgcggcccttacgggggccactatgcttggcggtgccattaccggggtggttcagcacaacgagggcctgagccttaccgcctacaaggatagcgccggggtccctactatctgctatggggagacaaagggcgtcaagatgggtcagagagccacgctgagcgattgtcagaagcaactgatacagtcagcaggggaacacgcaaaggcccttgacgggcttcctatgcagctctctgacgtatctctggtggggtctgtggacttcatttacaacgtaggcgtagctggcttcaacggcagtgctgtgaagcggcatctcaagagcctggattacgcagcggctggaaaggctgtactggactggcgctatattagcaagtaccagcagaagtcccctggcaccggttgggtgtacaagggcagcaaccgctggaccttcgactgctcccagtatattaatgggcagcgcaataaagtgtgctggggcctatgggagcgcaggcagtggcagagcaaagccatcgggaaccagtacaagaacgtaagcacagccctggctgaattgaaacgataagaggggacacatggcactagtagagaacgtacaaacacggtactacagccaagacgatttgtggtgcagagtagctgactacttagcgaaggatgccccggtacttaccggactccgtccggattcttccggtaactatgcagccgctattgagcggatttccgctaaaggtgtaaaggtgctgcgagtacctgtggggtcttattatgttggagactgccaccttactaaccctatgctgtttataggtgatggcctagagggtgttaacccgcttggggctgtattcgttaaaccgagcacagccagcaagatgttctactttgacggtacgagcacccgtggaatgggcggcgggttccttagaatgcgactgcagggggctgtcagcagtgattcgggacttatggtggaggtaacatcctggagctattttggggcggaaaactctgcttttaataacttggcgggctctgcgctggtgttacgtgactgtatggagagccacatctccggaaacttattccgtaggatgggtgcctctaacggcagcgttatactcctcggggattacataggtattcctaataacaacgtcaataacctgcacattcagaataacacgttcggactgtgctcgggcgcatggattaagagtacagcaaacagtaacccggacctggtgtggattacggataataagtttgagtgggatagtgtaccatacggggctaacacagctgcacagcacgtactggactttggacagctgtcgcgctcttggattacccgtaatggttttgcgcacttccgcccggactccgaccataacctgtatgccgggtgtattcgtattaggtctggagctgttggccctattgttatttctgataacaaggcgtatggatgcgaaggggaattctggaccattgaaggtggttatgtagatgccttcgacaatgatgcgaacattgcagatgccagcagtgttctatcctggtcactgagtagtactagggcttgccgcatcaaccctccgcgcgtgtacagtgggaacatgaacgtagtgcgcggggatagtccgttcggccctgggtttatcgggcaggcgtacatgcgtggcgctgctgctgctagtcgtaccgctagggctggagccgctagtactgtagcactggatgttcccgcgggtcaggagatgcgtcggtaccagttgccgctgcaccttctcggggctatagtgcgcgtatccttgcgagtctacaacccgggcgctactggtaacataaccttagcggtgggtagtggcggctcctctgttgccgcggtaccggctggtccagggtggttcgatgtagacttttacttgggtaacagcctaacgggtgacggagatttgcgcttcaccaacagcactggaaacacacttagcctggatggtattacagtagagcgtgctcgttctgttccatttagctttgcgtggacccctggtgctgtcgctgccggtacgctggtatctagccctgtacagactctcccgtacggcattactcaagcccctgtcggtttgagttctccggtatttaacgggtctgttgatgggctgctaactggtgtcagtagctacagtgggtacagctcctacaaagttactctgtttaatcctggggctgcggcaattacccctggggctactcgggctcgcttggtgctgcacttctaacgcacagcgtaaagcccaggcccagtctaggcgagcagatctatacctggacctgaaatttattagactcacgcgagcccctccctcaccctcaacgacgccaattgcccccataggggggtacctagcgtcaatttaggggggggg

SEQ ID NO: 45 - DNA, 43855 bp, Unknown
  source: /note="Description of Unknown: KP2M-P0205 Bacteriophage sequence"
cgccgcggcggtcgaagctgatcatagccttgaccccagtccaaaatccagagtcatccttaaccgatgcagcgctaccctcgcagccaacctcttcgtccacgaagaagcagtagcgtccgtgcacaccccgccgcagcatctccagcatcaggtagataccagcaccgcagtccgcccccaagcagtcagcttgttgcggattctttacgaacagcacgcccttgttagtgcagccgacgtccggtgcagcgctggttgggcgcaccactgtgtcgaggtgcgacgtaaacgctacgtcactttgttcggagtccccgaccagcacgaagtagttcccgtgcttgtcctttacgtagtgcataccactacccagcgcctgcataagcagcggctcaaaccacttagtgctgccccagctaggccggtgcgtttgcagtatctgcaagagcagctgcatatcaatcccatgcggattcaagaacattaagctgcctcctctatttcttcatcgtcgttgcccagatacttctcccccaagcaatcggctgcatactcagtgagaatcaacccgtgcacagggtgttcttctgcgtgctcaataagcacctgtcggtcctgtgcatacaccagttcttcttggtcatgcactaccccctctaccgaacagtgctcaatgtccgcgtcatatacataggcgtcgtggtaatcagaccaagtgcagctccagcgattatgcagcccttctcggccaactacatatacaaagtccccatcttcgacgcagccgtcgcagaccatttcaccgtcggcggtttcgtgcatatcatcaatggagtagcgcccctcgcagcagcagcaccgagcagattcagtgcctacgtagatgtatccatcggcttcttgcgcctcgtactcgtagtcatcacggattacaaaggcgtcactgccttcttcatcaacaccgcactggctgctatcgaggtacggcatcagcactgcgccgttgtaggttgggtgcggtatgcgtgccagcattaccccctcgagacattcagtgtttctggtgtacccatgcccccgcaggattgcatccgcagcgttgccgtaagcacggacgtactctttggtttcaggttttacgattgctcgtgccagcacttcgaagtcgtccccgaaaagctccccggtatactggatgaataggcgcaacccgttatccggcaacccgtggctggtggtggcgtacgtccgcacagggctatgcttaaatgagtacccgctcatgcagctacccgggccattctcgtaggcgtcgtaccattcctgctcggtcttgcacaggtacgttgtagggtctacgttcatagccttgaggtcttcgatagcatcgcggaagtctaccccgtttccgtagtagttagcgagccacttaccgacgcgcatctctacgcaacggtactcattaactgcggcgaagtccttatgcatccgcggctgccccagcatcacgatgggctcaccgttgcggaaaccaaagcccaaaggcacggcgaatctagacactacgaagccgtgcaacttcatgagcagcgcagcggcgttgccatcgcggaggtggcgtccgtaatcgtagccagtgtactcctggcgctgccgctcttctggtgcaagcataatgcgctcgaataactgcacggcctgcttgtgcaccttgtaaccggtgaactcttctacactagcaactacgcgctcaaccactacatcatcgccctcatagaagtcgcggcggcgttcccagaacttgctgtcgatggtgattcgcgccggggaaaagagttcgtagaaagttccagaccggtgcaggtctaccttttgcaacgggccgcgagtcatcattacttcgcggtactcagggtgcagtatcccgcctatagtcacctctaagccaggggtgtaagcgctgacagtgcggagacccataagcgcctgcagcggaccctcattgtgagggtggtcagaaccttgcatttgcaagtcctggaacggggtccagtaatcaccgctggaatacatcgaacatttaattggcagtgtgtttgcaccttccggcaacactactttccattcgataggtgctgtgacagtttctttgatagtctcttgcattttaatttgctcctgaatagattcaatgagttcgtcgttaactgccaagtcagcgcgcataccacgcagcgagctgtctttgcttataatacgagcgcacagccgccctaaatcttgtataggctccacgatatccgtaccgtagcagtgctgcaaccacatcgaacttaatgtgctcttgcaactgccgcgcggcagactctgtatactcgcggtacgtggtgagcaccaccgtagagtcctgcctacgaacacggaggagtctacgctcgaccggtatgatttgcttgagttcattaggaacctctttgaatgtttcccaagtgcagccgcacttgccctgcgtttccagcagacgccagcatagcagcgctgtttcgtctactgttagcataggcttctcttaggaacgcagtttcgtgacaccaacacaaaagccggagaggtgataacgtcacctgctcggtaactgctccgcattaatcccgcagaggttaaaagtatgcggcgctcattaattgccccctctaaagggatgagataatacagaccgctataggtctctcggtacacgtcatacttcatactgcacctcgtacattaaagcgcaggcagtagcctcgcaaggtcatacccaggcgctgcgcttgcttctcgtagtgctggcgcagcgctgccttcgcgctgtactctcgcgccagtccttcgattgttggttgctgcctacacatcagcagcgtctcaggattctttccgtgcataccttacctcaaatatcgttgttgctcttaccgtccaccgtgagcgttacagcggcgtccgggtactgctcctgcaccgccgcaaggatacgcgcgcccagctctttgcaaccaccctcggggtcttcaaagaggtcatactcagggcgcggctgcggttcctgcgccgccggttgctgcaactgcactgtgcaatagggcaccgggttgtttacgtcgttgcccagcaccagcatagcgctggtcacaatgatgttgaacacgttaaccataaagttgtctccagtcgttgataatgccaagattcacggcgtccagcacagtgcgggcagccatttcggtgtaggtatccacaaattctaaaggggattcctgattagtgtctttgtcagagaatatgaccacagtgtagttgtattctgcgtatacccgattgcaccacacgggccagagttcatggcccggatagaccagtattgctttcatatgaaacctcatacgccagttgcattcacatagcgccccgtaggacgctataggcttgctactaggccactgccttcaaagttgcgtccagcacagcacgtacatccacgccctgattaatgagcatactcaccaaatctgcgtcgcttacgccagtctctttggccttcttaatggcgtttttaacgcgccccagcgcttgcaagcgcactgcatcagcgtccagcgcgtcattcttcacctgctccgcttcggcagcgtacagggccatacaggagctatagaagctggcaacaataacttcgcggtcctgcttgtcagcttgtttgtagtcaagacgcatagtgtccagttcgattcccagcttctcagccgacgcatagcacttcttagcgttgaactcgtacttaccggactctttgttgaacttgatgggtaatagcgtacgcagcaccatatcaaagtcagcagcgtcactgcgctgcatatccgtagcccaggaaacgttgctgctgataagaccgtggaagagcgcgctgatagtgatgttacgctttgcttccactacgtcgcccagcgctttacgaatgctacccgcagcggtgagcttgaatactttaccagttgaatgggtcataatacacctctttgattgatttactatcggttaatttcacatagcgccccgtaggacgctataggctattaaccttcaccgtagccaaccatttggcacctccctagttgcttagataattactccacatagcaccccataggatgctataggctgtaattagtgcccaaattgggagttaacagcaggccacccactaggctgtttactgccgcccttttgtttttgctttcccctcaccctgtgctcaccgctcaacccttgtttgctgggcttcacagtaagcggcacgttatcggtggggttaagtgataactgcatattccgccgtaatgctaggcgttttgctttgcgcataatctcacctctcagagtacataatctagcgcagccttgttactgctacgctatgttatatgctctttgcggggtacactccgcgccttgttccctcgattcagaggagcgagctgctctcgcctcggcagtatggtttgcctcagaaccccggtgataacgtccggcacgcttactctttttaactgattatctaggctcggtcgtcatcgtaccagtcaaggtactgggcctccccgcaaatcagcttactgcttgctatctaagttactcagttaatcggaacttgtcaagcgtttatttcttactacttgctggctgtccagctcggggtattcggtagttcccaaccagcctgtttccctaaactccgatgagcatcacttcttaggggttatctcgctgttagcctctcagcgccctatcgtggttagggttccaatcgcgcatttactgttacacgacatattcagttactttgggattcaatctagcttatgttcttcgcggtgtcaactctttttatcgagtgtctaacccttcacactatctagccttaatccggcggagcctcccggctcggctccgttcagcacctcagcgcctcccggtgattgaactatagccccattgaaccaaaagaagcaagtaatattttcaactttttatcactaagagcaaaaagggtaagcagggcaaatacttagagctgcacttagaaccacactagggatagctctaggggtactctaaccactactaaccatactgcatagtactgcatagagcgtagcgtagtgacgtaacgtaagtgaaggaacgtagtgtagcgtagttaatgcttccctccctacggtcggtcatacagggcattactagtgagtactagtgagtagtagtgtatatagtgccctaaacccctcctactccggttacttcatttcataatagctttcgaatgaaagtaagagcaaagggatagcgctgggatagtggatgtgcgccctagtggggagcgcgcagcgtagcacagaatccgcgcaatgtaaagcactaaggatagccagtggatagcctagtgcatactagggatagcactagggacagcactacagcgcactagctggcccactatggccccactactggccccgctggacaggcacaaaataagcaaggcagagcacgcccctatggcccacagggagcgcacagggataacgcggggatagccctagtgccccatagagcgcacaggaagcgccctagtgaacgcacagggatagccatagggtagcactagcgatagccctagaacgcagcacaggcccgctgaggccctctggtgcgcactagcaggcccactcagtgccccccccccccccccctaaattgacgctaggtaccccctatgggggcaattgggcgcgttcagggtgagggaggggctcgcgtgagtctaataaatttcaggtccaggtatagatctgctcgcctagactgggcctgggctttacgctgtgcgttagaagtgcagcaccaagctagcccgagtagccccaggggtaattgccgcagccccaggattaaacagagtaactttgtaggagctgtacccactgtagctactgacaccagttagcagcccatcaacagacccgttaaataccggagaactcaaaccgacaggggcttgagtaatgccgtacgggagagtctgtacagggctagataccagcgtaccggcagcgacagcaccaggggtccacgcaaagctaaatggaacagaacgagcacgctctactgtaataccatccaggctaagtgtgtttccagtgctgttggtgaagcgcaaatctccgtcacccgttaggctgttacccaagtaaaagtctacatcgaaccaccctggaccagccggtaccgcggcaacagaggagccgccactacccaccgctaaggttatgttaccagtagcgcccgggttgtagactcgcaaggatacgcgcactatagccccgagaaggtgcagcggcaactggtaccgacgcatctcctgacccgcgggaacatccagtgctacagtactagcggctccagccctagcggtacgactagcagcagcagcgccacgcatgtacgcctgcccgataaacccagggccgaacggactatccccgcgcactacgttcatgttcccactgtacacgcgcggagggttgatgcggcaagccctagtactactcagtgaccaggatagaacactgctggcatctgcaatgttcgcatcattgtcgaaggcatctacataaccaccttcaatggtccagaattccccttcgcatccatacgccttgttatcagaaataacaatagggccaacagctccagacctaatacgaatacacccggcatacaggttatggtcggagtccgggcggaagtgcgcaaaaccattacgggtaatccaagagcgcgacagctgtccaaagtccagtacgtgctgtgcagctgtgttagccccgtatggtacactatcccactcaaacttattatccgtaatccacaccaggtccgggttactgtttgctgtactcttaatccatgcgcccgagcacagtccgaacgtgttattctgaatgtgcaggttattgacgttgttattaggaatacctatgtaatccccgaggagtataacgctgccgttagaggcacccatcctacggaataagtttccggagatgtggctctccatacagtcacgtaacaccagcgcagagcccgccaagttattaaaagcagagttttccgccccaaaatagctccaggatgttacctccaccataagtcccgaatcactgctgacagccccctgcagtcgcattctaaggaacccgccgcccattccacgggtgctcgtaccgtcaaagtagaacatcttgctggctgtgctcggtttaacgaatacagccccaagcgggttaacaccctctaggccatcacctataaacagcatagggttagtaaggtggcagtctccaacataataagaccccacaggtactcgcagcacctttacacctttagcggaaatccgctcaatagcggctgcatagttaccggaagaatccggacggagtccggtaagtaccggggcatccttcgctaagtagtcagctactctgcaccacaaatcgtcttggctgtagtaccgtgtttgtacgttctctactagtgccatgtgtcccctcttatcgtttcaattcagccagggctgtgcttacgttcttgtactggttcccgatggctttgctctgccactgcctgcgctcccataggccccagcacactttattgcgctgcccattaatatactgggagcagtcgaaggtccagcggttgctgcccttgtacacccaaccggtgccaggggacttctgctggtacttgctaatatagcgccagtccagtacagcctttccagccgctgcgtaatccaggctcttgagatgccgcttcacagcactgccgttgaagccagctacgcctacgttgtaaatgaagtccacagaccccaccagagatacgtcagagagctgcataggaagcccgtcaagggcctttgcgtgttcccctgctgactgtatcagttgcttctgacaatcgctcagcgtggctctctgacccatcttgacgccctttgtctccccatagcagatagtagggaccccggcgctatccttgtaggcggtaaggctcaggccctcgttgtgctgaaccaccccggtaatggcaccgccaagcatagtggcccccgtaagggccgcaataaccttagtccttaaactcatatttaatagtccccttacgtgcctgctcctctaggagcttgaatgtacgtctcttgtaatacgcattccacgccagggttagcaccgcgcacaccgtcgcagtgatgaagctgatagtgctccagttccagctcattaactctgccaaccaacctcctgataccgtagcgccggtaactgccgcacctgcccgggtagcgaggtctgccccaactacgtcccctaccttaatcatcctgctgctccttcttcctgaacagcttacgaatcaccagaatgaccactaggaagaccagaggaatgctggccccagctaatccggcgaggataagactgtaactatcattgttaaccacctgcaggcgccctgcctggattgtaccggcgctaatagtttgcacctgctccttactggacgtgtccaaagtgcctacgttagaatctgatacatcggttttgttggtggtgctggagtccaccttgttattcaagccaacggtttgcttggtgttttcggcaccaacctgagcagatacatccggcttagaaccaactaagccggtgagtgcagaggtcgccgagcaaccagtcagagtaaccgcgagcagtaacccagcgaccagtttacgcattagctagcagccttcactgcggctaccgcggcttctagcgcagcaatcttggtatcgaaggtagcacccgtctgggccacgtcctgcggctgcgtaagcatagcatacaggtccttaccgagaatgttcagctggcgcagcagctcctgctgttgcgctggggttgcttttgcaattgccatagtattgctccttactcaacagagattgctgtgattacaccatcttctacagtgatagttgctgctacagtagcggtagcccccgcctcccgagcggtggtgaacgtaataggtgcagttacttctgcgccgttaccaaccaccactacagcaccaccgtcagaggctcctgcagcagagagtgccgccactgctacagcccctgctgcatctacatcaggacccagagtatctagtgggccggtatcatgcgccaaggttgttgctttatcaagcgccactgccgcattacgtactgcctggcgctgtgccagtgttgcttctgcaaatgccattatcttcttcctctatgttgtttacctctgccacggttctgcaacctagcagccacaccccgaaggcccttagacactttgctctgtgcccaatccagcgggttctcaatgaaggcccgagccatcttctcagactcacgctcagccaccactttctcatcttccaccaggtgcccgttcagcgtagccaccatcatagcgattgcgtctgctcggtcgtccttagctaggctaccgcggtcgtacgtgatgccggacaactgcgcgaacgcggagtacagccaacgtctatcgcgggagtatgccatacaggtactaatgtcgtcgtggatagcacgctcgtgcactaccaggcggtgccgacgagtaactgggctgattgtgtcaatgatacgacgctctttctgcgtggagttattcaggtcccttacgccaataccggcgagacgccgctcccgcagacggttcaggataagcatagacacggtaccgtgccccatgttgctctccacaaccatatccgggatatctaactctacgcataggtcaatcagtttatcaatgttctcttcgctgatacctccttggaagccgcctacggagaataggtggatgtacgagttcgcagcaccaccagcagcgtaagacacttcgtccccgccacacccagccgggtccaccaccagcaccttatgctggtacggcaggtgcatgtccccgtagaatgccgggaagtacatctgctggcccataatcccctcatgctcatgctggtacaggtaccggcggtccgcgatgtaggagaacgtctcaggggaggaatcctggctaccagagtaaaccagcatatccgaaagcttgatgcgcgtacgcatttggtcggacagtgtagtgtcgagcatgtactgcagctggaagccttccggaccgaagtccagctccttctcaatcagtgcatcctcgtcgtagcgtccggtgtccgtgctctcgcctagcgtcccgtcgacgccgaagccggtgcgtttatagccgcgctcaataagctccaggatataaggagcaagtgtacttccatatcgctcttccatttcaacagacggaatgcgcccgggccacacgcggacctcgaagccgcgtcccggcagggttttatagatactgtccttggtctgcggtgtgcccaggtacagcgtatccccgtgcgtacagatagctgcgaagtctttagaaatcatcagcagctgctcacgctgggtttgcgttaaaccgttcttagtggtctcgatatcatccggaatcagcaggtccgcgcgcttcccctgcagggatgcagtgatacctacacaggctacgctggcggatttatccagcggtttcaggtcgcagttgacatcatagccttcgaatgaagtacggtccccacgagtagggtcggcctttaagtagcacagtagaggccaggtttctagcatacgaatgattaagttcgctacgtcagaggcctgcttctctgcaccggacacaatcaggatacgacaggattggtcctggatgagcctccagacggcgtacagtgcagctagtgtagacttagcctcaccacgctgtgcggccaccatgcgcttcctagggcccttctgcatgtactctgcaatgtcggcctgcatgtccgtcaacgtaaaacccaggaaccgcatacctatgtatgcgaattcccggaagtcacttagcgccgcggccatcatcatcgcgatgtcctcgcgctcctctttgggaatactgcgcggattcgcactataaccagtaagtttctggttgagcatgcgcagtcttcgcgcagtcttcaccgataccattagacaattccttctagtaagtcctcagagtctgaaccaccaactttatttagaatttcttgcttacgcgcctctctacgcgccgctagttcatcatcgaactcgtcacgaaggtcctgcatctcctcggaatctgcatccgcggtgatgtcgttgtccttcaagaacttggcgataaccgatttatctgcggcggggagcggcacctcgtcttccttagactgcttgatttcttcaatcaaggcctcagtgaacatgcggtgcagctccgagaggcgactgcgtttagccgcccctgccattgtgcctccagtaattatttaagttttgataatcccagcacttctcagctccgctaacagggcgtttagctgggtggcaacgttgctggtgtcggtactatccgccacagcgtttgccgggcccttgtacgccagttcgcctactgaggccagccagttgtcaaaagctgcctgggttacatacccatcgcccgcctctacatctgcgcccagcctagccgccacgagcgtaccggccggtagcgtctccgcaaacagcaacgaatttcccactaccacaaagctgtagccggggatttggccctgcccattcagctcaactatggccttactaaaagcgatgggcggcgtcacggtgtctgtgggggtatccagtactgtaaaccaagggtagcttacagtgaccctgtcggatataaaggtctgctctagattagttactcgggtatccaggatagcgtcggcagactttctagcagcctcttccgcatccaccctttggtccagacgggcgtcgccggaatcgacgtaacccttgttagtggcgtccgcagtgtccactgggtctcctaggtgggtgattcgatatccgtgcatactgatatcgccgtagaagccctcaatagaacgcccctcaactagctcttgagccaggtgcaggaactgcgtattctgggtatctacgttgccttcaataaacggagcaccgctagagaattcaatgtaaagatactctcgttcagtcttacgaattaggagcaccactgtctctgcagacagtggcgagttcagacgaatattggtggagctggtccaagtgaaggcagtagtctcagcaccatctaagtaaacgtgaatataggacttatccaggtactcgatatcgcactggatatcctgagtacctgcaggctttaccgactcttgccagctgaacgccatattaatcgtctccgaagttattgatgatagctcgcgtaggtgcgaattcctggattagcggtacctgcttagtgaaggtcttgatatccatattaccggtagccaggtcctgtacggccccgagcagccctgtgacgtaacccatagatgccaacgagtgacgaggagaatctcccaggaaaatatcctgcagtaaggataccccgccgatggcactcatacccgttacggattcactgatgagtttctgggtgtctacatcctttccgtccatgccatgcttggccatagtagccagcagcatcaacgggaactggtacgccataatgtgggccacaccaatccacccagcatcgttcagctctctacgcagaatcttgttagtggcagccagtgcgaagctctggtaccctacaatgactttgccgataggattgaactgcgcaaagtgcgaggtctcgccggtacgaatctgctgtaccaggtagtccatcatacgcgtccctacaacctcaacttgcatctgcaggtccggctggaacatggcgcccgggttagccttgttggcagcgatagcgcggtccgcaacgtcacgggtaagcccgaaacgctccagacgcttaaacgcctcagcatcgcccttgaacatctgcgtaagctcatccgccacaatgccggagttcaggttaacctgcagccggtgcaccatactcattccgttgacgtgacgtgcagcctgcccaacgttctgagtgacgttgaaccaggaggcctgacgggtcaggtccaggttatcgtcggcgtacgtattcaaccagcggaagcgcatctccttctggatattaccacgcagcacagtgtctagacgggcagccatatccggagtcttgatagctacggcaccttccttgaaccaaggctggtcacgcatactgcgcagcactctagccataccgaactccttcatggccaaagcagtatcagtcagctgatataggccggagttcttaagcatggtggcgttagccatgttcccggctgcacgcagcaaatccggaagctgtccagcgtcagcaggtgccccacccaggataaagtcgatggtgtcattgacggtcttctcccacttagcggaatccgctagcgcgtgcttagactcatcaatcatcttagcgagctgtcccaggtcctgtacgcctgcataggccatgcctacacgcccagacatacggttagtgtacccgtgcataaccttggctacatcagtatccatcaggtcctgcatgcgcatgctcttaccgttcaccagatactctttgtccatgttgaaccgagtacgctgacgcagattccgcgcaggggatgtgctaccggatttgcgtacgttaccagccaggaaactctggattgcagactcatctacaccagcgctacgcatagccataacgacctcgtcgttacccataccgttaatcagctgcttccacatagggccagactgcccggcgcggccattatagataccgtcaaccatctccttggcaacacgctgcactacccctgactccatgctcgggtacacgtcccgcagggcggaccggaacagggcgcggtagtcgtccagagtgttaccctgtgcgataccttgacgcatcttgtcatagctgtactgacgcgggaagtagtagtcggatttaaccaacgcaccatcatccactagacctgcattgagcatatgctcgtgccacttgctagcccagccagagcggcgataggcgtcaaccagtggagcaatctctgcatctggcaccggcacagcgcggccatttacatcagcactgtaggcagcatccaggtacttgctcaggcggtcttccagtgcagcccgctcagcgcggaacttgctccgatggaagaagcgctcagagaaacctacacccttatccttcaacgcacccaggatagcgtcttccactacgctggcgctggcgtccatctccaaagtaaggttgcgtttgaagtccactacggacgggcgacgaccccctacggcggacgcatccgacactagcagcttagccaagtcttcgttgccttgggcgatgttatcgtacagggcaaacatagtggagagcttcttcttagcgccgtccagcatagcttgggcacccttagcctcgttgagggtagtgctgcccgccaggtcctggaaggcttcgctacggaagctctgggcttggtctgcgtagtccttagctgtccacttaacggcgtcctcatacgcatccaggacgtcctccaaggcagagcctttggccttgatgcccagggcgttcatgatgtactcgcccagttggcggagcatgctcttaccggttggggatttcgtccgcgccagatgctcaacccactcagggctgtcgcctaagcctgccagcatctcgtgcacattacttgcgtaatatcgcatacgcggtgtcagggtggaatcagccgcaataacagcgcgcacttcctccaggcgtttagcaatctcgggattactgtcaatagcgcgcgcagtagcggcatgaatcagttcgtgcacggccaccttgcttgtatctgcatccatagcgcgcagcgcatcaccgactgtagtccaggtgctgccgttagcttgcttaggcgcgcgcagggatatctctccccgcttagctaaatcttgttgtgcataagtgtagcggctgcggtttgcggagcctgctactagtttaaaatcaatgtcatttacagcatcgcccagcgtgtccagaatagccttctgtcctgctgtcaagtgctcagacttcttcaagaactgaactacgtgctgtgctttcatgttcacggaggcggtattgtttctcgatacttggatgctttcatccagtgtcttagtgagaatttcctctccctctcctactccggtaacattagcatccctcgctgtacgagttgtaggcgcttctgggtcgaacataggctcacgcccagtacgagccttagcggcagctttagcagccctagacatatcccagagctggtctaacccagctacgcccgctaccagtgcagttaccgcagcagactgccccagttggtcctgtgcgtagaatgcggaccctacgtcagcggcgcggatagcggtacgtgcagctaagcccgcacgaccagcaataccagcagcagacatcggagccaggatgaacggggagtcgcctaccagcatgcccgcgaacccagctactgtgttgtcagccattaagcggtcacggtcgcgttgctcaagcatttgctgcatgcggtagttgtaatcctctaccgacaccgagtcgtgcaagtactcaatctcttcctgatttggagcatacagcttagctctggtgtcgctgctcagagtctgcttggcgttaaagttctggtcccggtcaaatgccggggcagaggccttacggatagccgcagcgatgatactgttgcccatacctgatgcaaagctctccccggctgtagtggctggggtcttggcctgcgccagtaatgaggcacgttccagtgcatttaggccgttgtctccggcatcgttccaatctacgcgctcaggcgcaggtttaagtgttgcgcccttagcagaatccttttcctgtggattcggttcttggttcagaaactgagccataatatctcctaaaagaattttgataaggggaggccccgaagggcctctggttagtgcgttgcttcaaagagccaatcacgtaggttttgttccaggtacttcttacgctcaggttgggcctgcttgtacgcagcggtattccgcagcgcttgccaagccctaccctgggcctcagatacagggtactgatacgcccccaccggggacttagcagccttgcgcacctgtgccatcgcctctgctacggggccagagctaccgttaccgccgtgatagttcaggtccaccatgacctttaacgcctcgtcggaggcagtcaaaccctgtcccttgagttgcttctgcacgttcggtatgtactgcttctccagtgaggatttgaggatactgacaccgtcgtcaatggtcactttctgtgggacgggcatgcccgagttaacgtgcagaccgaaacctacactacccttgcctttgccttcccggaacccttcgaacttcatagtggtagcgagaatgtcgctaaacagcgacggctccagccctaccgagttacggccgttgacctgtacgctgacagcacgcccgttgtcgtggtcgtagaaggtggcgggacgcactcctacttgctcactgccaatcttcatatctccagccagtgccgaatcgtacgcagcctgcgcagtcgtctgaacgtctcgaaggttcacagacatcgtctggaaggtgcccttcttgtcgaacacggttacggtcatgttctgacctgcgttgcccgcagtggcggcctgcactactacacgctctatgttgctgtggtctgacatatactgaacctggttctgtatatgctgctgcagggaggccttgaattgctcttggtcgcccttataatcacccatgatagattgcacagaggtgcccgcgggcagatacacatgcctaggtgccccagcaatgtccagctctaacttacgggattggatattgccttttagcatcgtattgatgtcgtcagcgtccttccctacaagggattccgggttgtgattatacatataacggtactcctcttccatagcagcgcgagcttcctggcgctgggcatctgcatccccgaagaagctaaaccagttggccgtgccacttgggtccaccatcttgtccgtggggttactctggatattgctgtagcgcccactggccttattgcgtgcctggcggcgaaggtcgtccaagatagtgttactggcattatttgggttttgtgtaacagctttctgcaccactccacgccactcagatgggacctcagacagcagcgccatcttccctaagtccgtactggtgctataagcctgtgcccataagttgatgctatttacgttctcgcgggaaacctcaccatcctcaccgagctggtccagcgtagtcagcgtacgtgccatatccaaagacatacgcttgtgcgcttcgttgactgcccacgcatccttgctgttgctcccgtatgccagcagctgcaggttcccttccggggtgtccggaaagcttttgagcagctcgttgcgcgccttacccaggtcgcccttgtacatccccgccagggtggagcttggcatgtttccagtaattgctgtgcgcaatgcctgggtgtccgctgccttctcgcgaatggtctgggccttgttccagaactccatgctggccccagcgctgagcaccccattggttgactgctcaatgattcgaccacggatacgctgcatagtctgctcttgctgctcaggagtctgcccttcaagagactggattgcatcggagatttcgaaacgggcttgggtctcaatctgagcacctgcgcgcttgaactcctgatacagtgccgcgttgacgtccactgagttaaccccgagttccttggtagctaactcttgcagctggtttattaccatcgggtcctgcgtctgctgcgccacgctgaccagatactgcttggcccggtccagcttcttgctcttatccaagtgctcagcagccagtatgctatctaaaccggtcttgatagacatctgcgcagcggcaccctgtcccgcctgcaggcgctgatagaactcatcactggacgagctaaggccgcggtcgagtgcacggtcagcctgcgccagggcaaacgcagctctacctttctggaaggctgtgtagttcgccatgctggtagcacggagctgctgcagtatattcgtggcagactgtttggacatgtccgggagatacatcccgagcttgtctgccattgactgtacgtgctcttgctcctgctgctggaattcctcgtcagtcagaccagactcagcagctttcttagctcgtgcgatgctatctgtgcgccacttggctagagagtcgtacgcggcggcggatacgtagccatcctgataggcctcgcgtacgaagatgttctgcttctgtacagcctcatctttggaagccattgcatctactgcgccctgggcatccattgcgccgcgcaccgttgcggctgcagcgttttcttttactgcttcgtcaaaccctacgccgaagtcctgcacgaaccctgacagggcagctaggcgttttgctttggaggtatcaacagacacctcacttaccgttgacggtaagctaacatcgttggactgcagttgcactcctccgatacttaacccctgtctactgggttgaatcacaggcatttgacattcctcttaagttaccaggtatgaactgagctgttacctttgctcccccataaatcataggaggacgccatgttctgagtagctgctgcaccacttccgggtgttgagctaccagagtcagtagacgacgcagcgttaccagcgtactgcccaacggcagatgccccgacactcaacaacgagttaaacatgttatcgtaggggtcctccatgtccatgttagccaggccgctgtccacggccttgtccgtcattagacggaaaccctcttcctgagttgcctgctggtcacgcacgctggcctcttgtcgtccggctacagtgttcactgtggctacggcgtctttaacagaggcccccatagtaccggaagctgctgcctgcagccctacttggctctgtgcctgcagcttctgctgctggatgttaaacagagatacctcagtccggtccctggactgggctcgctgtagcgcgatgtcgtttagctgtttggctgtctgttgaatcacagccttgttcctggccttggacacttcaatctgagcaccatgccccagaacggtcttagcggccatggccgcaaccatccaccacatattaaattctccgtctgcgttggttgtagcgcaggatgtacgagatatccagcacattcagttccatagaaccctcagtaaataatgacacctcggttgtgtctgcgttagtacggcatggcacggtaatcgtagccaggtccatacgcaggacctgcccgagcgtcagctcttttgagttcatcaggatacctgtcagttccccgccccagttgacatcccgtggggtgtctagtacctgcacatcgaagtgcccagagttacgtaccgccacatccaggcgcagcaggcgcacgtgcccactccccacgagcttgtcattctggtcccgcagaataggtgtagttagcgtgaacgtactgcggtaacgcctcccgattacgtaggtgccatcaggtacaccgcgtacaacccgcagggtgttctccccggcaatctcctttatgccaacctcagtaggtcccatagggttactgggcaagtaagttaggataagctcttcctcatagcggtcagcccacccaactggacgcagtactgccggaacggtgaataccccgtcctgtacttgaacttgcttctgcaaatccgagtacgcttcgcgatactccgaacccagctggtaaccttcacgcgggtccatagacacaatcaaaagcttgttgctgggactgggcccttgcatgtacaagaacacttcatcctccagcgcttgtacgctcaggattggatacgggaacgaccacttatgccacgccgcctgcatcttagcgccgtcacttccgccccacatgaactcgtagaccagcaagctactacgctccccagacatgcgcgagaaggccatattggtgacactggagttttgcatctgcaataccctgcctgggatataccgcggtaagtgcaccgtagaatcctgtgtagtatactgcgatgaagtatacggcgatgggatcaactcaagaatacccgcgtagctgtcgttgcgcttgttcgggtaaattactgtctgccctgccatgaccggagtaacgcgactatcgcactcataggtgctggtaatgctaatacttgcgttagtgggggtgagcactgctgaacccggcacaacggcctgcatgctgttagcaaacaggaccaggtccctgttaaactgtacagcggtacggtacacagaatcctgcgcagacgcagagctaatactgatacggtccgtatccagcagtgacgtcacagtagagcggtagaagcgctgatacaggcccgaggcggacatatccacagagctgccgctaagcagaaccaggcgaccctggaaagctgcaatgccagtaatgtagccattctcgacgaaccccggattaccgttgttatcgtcgttgcctgctaagcgcccttcccaatcccgcgcaataatattgtcatccgcggcaagttctctgggcatgttcgtaatcttggtgatgctgccgtacgcccccacctcagaccaggtgcgggtgctgtagctgaactgataccacgctgtctcagacgaggctgtacctacacggcacattgctccgtcagcttgcgctgggagctgtgcaggcaggtcctgctcctgatctacacgggactggttggataccccagcgtaagtatcaccggcgtcagaggacaccacgcagttgctcagtccatagaagaacaggtacgcaccgcgtacgctcacgttcccggcgggcatgccattagctacaagagagtcccgcagctgctgagcaacgtaggcacctgatacctcctcagcgttaccgctggtgctgccagcagctggggcggtgtagtcccctgagtagtctacccctgcggaggtaactgtgacgttccagcgtttctggaatgctgcagacttaacgtagaagaaccccgtggtgctggggtcgatacgcccagtattgtccacggttgtgctaggagccatctccgtattcaggatataagtcagtccggcaatgcttgcggtctgcaaagaggtctggcctacggtggtaacgaagtacgggtcgttgccggaattaaggatggtctttccattcttagccagcaaccaccagttaccgttgctggtgttaatcagcaggtgcctaccgtcagtgccacgctcgacgtattcagtgaacagggagtcaagcccagggttatcgattgtgctttcccatacaatctcacccggcggtctacggcggataccggaaaccgggtcgctgagcatattcagctgcgcccccagttgtcctggttggcgctctctcggaacctgctgggaaacgccctgcagcaagctctgaatagtaccttctaatgattgcgccataacctctccttagaccataaaacgagcgcggcggattctgcgtgcaaaacgggtcttgctggtgctgaacttctgattgcgcagatgctcgcgcagcaccatgctcttgtaccgctcagcttcctgtgcgtaattagcgtagttgctgtcaccgcccaggtcatttaagtatacctgcgcagtggtgtagttagccacccacatagcggcgtgctccggcaggtcctcaaaggccaaatccagtaccacacgaatacgcacaggcgcatcgaagtattggttctgctctaccaggtcgtataggttcccgtcacgtaccccgtacttggattctgagcaggcgtcatatacagccagctggttccacggcaccttaatcaggccgtcggtggtgggcgtaacttcacgctcgaccacgttaaaccagaatcctgtgctgagcaacccacgacggttacgtgcaagtgcagagcgagctaatccagcgctagggttactagtgttgatgtccataacgcgggactcccccagggcttccagcgtcaggttcacagcgtctaattctctcatatttgttcctctattaaagaccccttggacctttaagacagggacaaaaaaaaagcccctggcacccgaaggcaccaggggcgcgtattactcttccgcagtatcagcggctgcatcagccgccttacgggttttcttggtagccttgcggccagactcgaccgaggccacctggatgttcttcgctacatcggtggcggccttaaccgcctcccgctgagctgcattggcctggagagtctccagaccgaacgtagcgattactgccattgaacctccaattaggacttggtggtgaaggtgaacttagtcactgcagcggtgtccggacgacgcagacctatgttgtacatcgcgtagcagtccagtacgttgctgaactcgcgcgtatcgtcccagatgcgggaggtgaacggcttagcttcaacagtcaccagggtcttggacttgctgaaagtcaccatacggcacagcgcgtcgtctgcggtgacagtgtaagcagagcccagcggatgcgtaccagcctcggtcgggaactcggtgcactctactacaggtacgccgttcatcttcactacacgacggtctttgtaaccgtcgttgttggacggaccgaattcgatgttcaggagcttcggatgctccagcagacgcgaataggtatcgacatccaccagagtgaccatatccgccagcggggtcttgcgcttgatgagctcatcaataccagccttgtgcgccaggttgatgttcatggcgttagcctccatctcagcctgggtcagctgcgtggcggtagtggtacccggaaccaggatagctgcgcctacctctataccgtcgttgaacgccggtttcaggtgcgccggagcaacccaggaacggcccttgatgagctgaatcaggtgcgcctggtcgaaggtctctgcgaactcagagccgttgttctggcccatctcggttaggaagtccggaccggtccagtcatcctggtagtcaatcgggttacggatatacagcaccgtatccaccacgataatcatcttatcgttacgaaccggggtgctatccagcgcctcgccggagcgacgacccttcaccgaggaggtgttcaagcggtcaatacggtaggtgttagaaccgctgatagagcgctggctggagagtcccaggaatagagcctggtactggaagcgggtatccacttcgttctgatacacttccaggtgaatgtctacgtcagacgccgcgccgccccagtgcggacgagtcaggttgccattataaatagtgttagccatgccttagtttcctttataaataaaattaaagacctacgcgcttaccagcctcacggcgtgcgagcaaatcattataacgttgactgaactgcggagatgccaagctacggttgcccgcttcctgacggagtttggtatattctgcacggaagtccgcagcagataatgcgttgttgctggctacgccccgtaccattgggttctgtgtcttgataagacccatatcccggcagaagcccgctaccaactcagcggcctgcttaagctcaccagcgttagcgagtacacgagctgcgttacgcagaggttcaggagccttggaattaaacagctgtgctgctacctcccagttctccttcccgcccacaatatcgtaagcttcctgcactgccttggtggcttgtccaacctggtcttccaggtacgccttagccaacagctctgcgtaagcagcgtgctcgccgaaacgttccttaatgaaggccgtatcgattaggttagggtcctgatactccagggccttaccaagtgcccgcaccatatcagagtcagttaacccagatacttgcttcaacatagctaccccggcgtcaatcgtcggattgcctgtctgagccagctcctggggctgctccttagcgctatcgccacccttatccagggctgcttttagggcttcgatatccagaggaatcttagcaggttcaggggaatctttgccctgttgctgctgggtaggtgcgggcgcatcctgcacgccttgattgttcggggcgttaaggggagcacctaggcccggaatcttagggccaccttggttctctacctgtgtagtttctacgttctgaccgttttctacgttatccatctatgcctctgttgttaacttggtaataagcccagctgcttacctgctactgttgggtctgctgctgtcaagccctggagttggtcctgtgctgcacctgcggatacatcggcagacgcatcttgaacttcttgcttctgttgcagctgctcttctgtgtacatgaacggctcgctgacgataccgtaggcgtcgaagtaccagtctacgcacgcatccttgttgaagcgtggagtaatctgctccagcaccgggatagccagttgcatggactgcgctgcctctagcagcttatccgctgctgcggctttagccagtgcagaggtacccaccgtaacgttgatgctcactacaccttcgctgaggtacagcttaaagcgaggatataccagtgcagtgtacaggtacgccagcttacgcagccatgtgtcgctcagaatactgaacccgccacccatagcggcttccgcctctttggcattctggcgaatctcgtaagccgtgacgcgctcaccttgccgggagttaccggtgtacataaacgcacgcgacagtttctgttcgagcatctgaatgttgctggcaatccactgaatcttctgggcagagccaccctcgtaagcagtgacgggggatttgctgttcccgttggaaccgccgccgcccacctgcacagcctcgccagtctccgacgttgcgaactcgtccacgtctaacccagagcttgcgtcaatcagcgggattaacctcgcagactcaacctcgtagttagtcaacgcttccgacagtaccgataatctggcgaagtccccggcgtagtcctctaccaagccgcgcccgtagtgttcgccgctaacaaggttccacaccagcacgttgtagggaagctccagctccggataggtgctgctgtctccaatgcggtgcccgtctgcttcttggtacacctcgtagcttactacctctgcaccgtcctctgtccgcttaactttgcgacaagaggcagtgtagatatcaacgtcgccgtatgggtctttgtcacggtagaaggtgttccggaaactctctggcaggtcctggacgcttgcgcgctctctgataatgagtcgcaggacgttaccgcttccatcccttcgaacggtaaagttacggactgaatagacgatggatttacctgtccgctcatcaatatactccaacgcgttacctgtaaccagcagcagcttcacagcctgcaacttcgcagcataaccgtctttctcaaatactttctgtgacgccgtgttctcgacctcggccaacttagattctgccgtagcagcactgcccagcgaactaatgaactcgtccaggtccgaactcttggagaaccggaagaagctagtgccttgcgggaacagcgcgcctacaatcttagtggctgcagtgttgaccagctgcgcccctgtgctctggtaatcacgctccaggggcctgcgtctaccgtccagggaatcgtcccgggtaaagatagtgctgagcgtccactgcgcaaacttctcagaggcatccaagacacccgcgtcctggtccttcttaaagagttctgctaatgttgctttttgttccaagctacccccttacaggcccagaggattgctctgccctgcttgtcgccgtttcttctgctcagacgtaattgcctctgcagatgcagaggcagcccctgcggggtcaatctcagcaatgttatctgcggcgctattagcctctaaggcagcctgttgtttagctgcgctggcctgttgctctgccaagcgctgctgcgcctctaatcctgcgttgtcagtaaggccgagcatatccgtggccttgcctaacagtttacctaaaccaccactcattctgacctcactaaatgataagttgtattgtatgtgttatccgatgcacctcggctaatggcgatacgcccagcccgcatactcttagctattgcgcgaaggccctgcataatcacaagtaccgccttactgttacccggcttcaatacgaagaagtctgtatacagcacaggctctacgtaatgacagtcctctacagcttctgggtagtagcttacagcaccgactaagtcgccttgggagtcatagactcctagtatatactgtttacccagtatgctgcccagtactctccagtagtgctgctctggagctaggccccgactaatgccgtggcccagttcgtgtagttgcctcactgcgtctgtaatgtcgtcagacttatacagaaccttgagagtgtaatcggaagttttactagtgtgttttaacttcattcctactccggtaacttcatttatcagcagaagaagaaaggcgattccagtacttgccggatgtccagagtacctacctcgggcatatccaggtccgtcaagtccgccccggctgctgctgctgcgcgagtaatatccccaagcaggtcgtgctcttcgtataggctcacaaactgttcgcggatgtgtcggtgcatagcgtcaacgtcagctgcatgtgtagccagcgagtcgtgaataggcacgatgtccaacccttccgcggcacacagaaccatcatcaagtgcgtactgtccaggctatgcacaaagttcggggcaatcccagaggctgccttgcgcttgttacaggtcttgaaatcccggttatgcacccgcatgacggtgaggttcatgcagtcaatgcgtacccgcacttcttcacgctgcgtgtaacggttcattacaagcccacccagcggcgtataccactgcagatgctggcttgccggtacgcgtctagcgaggttctgcaagtaccccataactgccgcagcagctgggttcgcctcttcgatagcggtacgcatacgcggcgccaggtagcacgacaggttccacaggctgttagtctcggcaccctcgtatccctcggcgcaagcaccttcgaagatgtagtcgctgcagctgcgcaccgtagcgctgtagaaataggtcatactggggcgcttggtcatactgcgggtgatttcgttctctctccagtacgtgctctggataacgaaatcctccttgtccaggtccagtatcaccttctcgtccgtacggcgcttcacgtccatgtacaggtcagctttcttatagttaccctcccagtacaggttcgtcagacgcccgcccacagggtctctcaggagcgctgagagatgctgcccacctgagtttgtagcgtccatagcaactgggattcggctaatatgctcttctgggcatccagaacgcacagcattaaccaggtcgatagcggcggccaataggcaccaagggctgtccgcggaggtgaaagcagggcaatcaaacggtgaaactgtaagctgctcaatctctgcaaagttcgcatcaacccaagctgcgcggtcttcgaataaggtcttgtcataaccaaagcatgtggcgacatgcaccttgagccagaataagccgcgatcacccagaggttttcctctgccaaactcaagaagggctttctgcaaatcagaaccttgagggtgcagcgaggacttgaagtacaaccggtaccgccaatccacgcaggttgggaagtacagagctttctcatctttgaattcctctgccatttctaacgtagtcaaaaggctgcgcagttgcgacacacgcttacggtctgcgctgtaccacagggacatgcgcgtcttccactcaccaaaacggtcaagctcttcctctgtgtagttctcttttggaacaccatccaagtaccactccggtttcggctccggtactgagcgcggcatgcctatcccaacacccatggcccgtgcttcttgcaccagttccagtatgcgcttattaatacggtacggggtttcctgtgccttattaagcgcttttttaatgccatccgcggacttaaatgcttccgctacttcacggagacgagctctgtcaatgtgcgagttatgataggtcccgcgattgtcgataggggtgaggtatccaccatcccacagagtagtgtgctgcaccggcggtaccagcataggcggcttcatggttacagtgtcagcggactctaccagtttctggaaggcctccataacgtcgtcagccggatagagcatgctcagattcccgctacagttcttccactggaacaggcccgtctcaaacaccgcggcacacagcagacgccctacggagatgttctgggcattggtccaaggctcgtgcccatagtgcacgttctcggcactggcgcggagcgtacgcaggatgtgcgtaggggacttcgtacggcgctctgtgaggtactcatacacacggtccatgtacgcaggggctacgttgcgtaactgcagagccagtagctctgactgtacgtttctgcccagtgcggacattaccgcctgtgcagtctgacggcgactggcggactcgccaggggcgacgctgaacgcctcaaacattgtgcacaggctcagagtggtcaggacgtccaaggggactaagcgcaggaaccgtcggtacttaccaccaatgcccggggctttgacatttcgcatctcatcgatagcggcagcagccacctcatatgccgaggtgagcatacgctgcgtcatcggcaggttcataatcccgccattctgcagtgcgtccgtaatcagcttacgtgcccgctcgattccgcgaatcttataggtctcttcaagctccagctggcgcttcaccagtgcttcctcgggtactacaaccgtattcagggcgctaatcataggcgcttagtctccttggttatgtccggtacttctaactactgattgcgactcacccagagattgtacatctccagatagtctttagcggagctttcgtcgccccgttctactgctttctgccacatcccgtggcaccatgcgctaggcgtcaatgcacttacctcggtgttgctcgtacagttctgagtacttgtcggacttggcaatgtcctgctccagcttatccttgttcccggcgcgcagtctgtacttgagccggttccccaggcagtatccgtagaactgctctttcgtcatactgcgtgcaatcacctcaattgcctccaggtccgggaagaactggtagtgccgaggagagttcactgagtcagaaacagcctcgctcttcgaatggaagagctggaagaactccgctcgccaagaggtcccacactcggctaaggttataagtccgtcttctgcgcacgtcactaatctgggggagtctaggtctacctgtagctgttcacagatgtccttccagataccccctacgtgactcgctttgcgcacaaccaaatcacctgcatagaatttagtggattcaatcatttaatagtctcccgtgctttgcgtcgtgcccgggccttgcgggccttgagcttctgtgcttgtgctagttcttccggcgtcttgtgcgtatagtatagcatatccgtaggttctcggtctaagtaatcggcgaccctacgtagagattcagcaatagccccagaagattgcatgctaccaacaatccagcgcccagcggcagatgccactttgccttcccctccattgcacgagcgatgaagagcaccccgaatacgcccagtaatatgacagtggtcaacgacaacagaatcaccagttacccccttgattgtgaagtccaaaggtttgccgcagaggaggcatatacctccctggtctttggcaagcttaatagccacagagcgaatctgtgctcgagttattttacgcagcgccatgaaatccctcttaacatatgatataccgtactttgagccatacccaggcgtctagctatagcgttgctaccccattcccggtccccaggaatgtgcatttgccgcagatagcgcaccgtaccttcgttcaaacgtgagcggccgctgctggaaccctttgctgatttgcttttgtgggtccctccatgcaggtgctcagggttaatgcagcgagaatttccacaggtgtgctgtactacttcgggccactctcctgtgtgttcatagtacgccttcctgtgtgcggttgtaggttggcgtttaccgtcaataagcacccacgcggataggaacccagtctttggccgcccctttctcccatggtctatacaaggtgtactcattaccatacctcaatccccccaactacatccagcatagcattgtcgtgaatgagagaatccaaatgctcaaccgttcttcgatgtgttttgggtgctcgttcacgcagcgcatccagaatagtttcaagttcatcgtgtttcccctcgtagtataactcaatcgcccgcaggctcatttccttcgcagacatcttcgccattgtctgggtgctcctgtatccactgtatatgctgtttatggtactcgtgcagcgaatgcacccagtcacgcagactgggagtagtcaacagtgacatcagatactgataggcagaatctgacggggagcgccgcaggaacaggcattctgcctctgcgagtacgtcttggttgtttcgagcgtaagccgctacgacgaattctgcggcgtcctgctctgaggtaatagggtagatagcatcaaaggccgttcgcttgccacagggcttcccatcaagcaacgtgatgcctttgacgttatctgcgtcgtcccctgctagcatctgccaccagaagaacttcaacccgtgtgctcgtacaggcatagcctgggtgtcatcccacttaatccatccgaatgggtcctccagtgcaggccacactgtacctgtcagtatatcgaaccgagccatagggctgagccaagaatccttgtcctgggacatcaggattccccggtctccgaagctgtacgaatccattacaaagaggtcgtcggcctcgaagtagtcactgctgactacctgaataccctgctcagaatactggtctgggttctcaatcaggtgccgcttcaacggtgccttgagcggtagctcctgtcgattagcgcgctgcccctgatagggcttagccgtaggcaggtgccagcgcaagcacttagcacatcctgcaggcgtcaggtacgccactgcctctgagcagccgaccaggaacatgtcctcaagcaccagctgatagaagcggcgtattgcggtatccaaacgttttactgtagcggcggctttgtacacgcaaaaatccgcatcgtacagcagaatcttcccagagttctgcggagctaactgctcgctaagctgggacaagtcaaccccgttgataatcatcagcgccccgtaatatcgcgggccttcttgtcggcccagttaacccaacgttctgcccactttgccttgctcagcttatcgccaaggtagcacagtcccgccaatggaatcagcgggagaatcaaagctacgtaaattgcgcgagatacgtacaacatacttaagcctccagttcagacagcaccagcacggtgccgagcatgtccccgattacttccggagtacgcaggctctggtctacgtcgtagatacaggagccaatctccgccaggccaacgctgagcgtgcccactacgcggataagtacaaggtcgtctcctcgtaacttatcggcatgtgccgccagatcgttgtgctcccggaaggctgtagcggccaggtccaggtccattccgtacagggccgccagctcatctagtgcgttgtagatgtcgtccagactaatattaagcaccccatacgccgctgcatcgtataccgctgagccgaccgtaatggcaaggttctcgtacgcttctaatactttatccattagtcaaatcctttcagtttgtgtttttgaatgaaggcgtaggctttggtctcagtggccgtggcctctgcgcccagggcgtatgcactgcgccgggacttggcgcactggcgattcaagtgataacgctgcgcactaatctcgggacccagaaggcttgccctgtatgcgtgagagctagctgcccagcgccagtcgtctgctcgcttctgcaaacgctgtgcgcgcagaagcagaaacacagcgtactgttctttggcccatgtgattatgcgcatttataccccccaggaagttagctacttcgtcacgcttggcacgcaggttatcagcatgacaagcatgcgcttctgctacctctttgctgtgcttggaggcctctactcgcgcctcggattgagcggccagacgtactgcgtcgtctgcgaatttaactgacagctgctcgttaacctgcgctttggcatctgctcgtttagcttctgctgtgtaggctgcactcaggagtttgatgagaatgttgatgatgttcatagtcttcctctaaggccccatgcggggccgtattagttaatagtgttgttgttttgactaagcccaggtgcgtttagtagctgttaaattcttcgctgtgcattaactctactaatacatcaccatgacaagcctggggtttgcagtaacaacccaggacctgcccccttaaactagcaagctcttttctgagcagcgggtccttttctagtttctgtattatgtactccctgtacatttttatgcactcgtcccgtccgtaatcttttacagtgtaaggattgccccacaaagaccccctacctatgtaaacggtaaaaggttctttgtacctgttgactacgcgggttatcgctcaggcttgaggtgcagcaggcgcagcgggcgctgctggcgctacaggggccgctggagccgctggagcagcgggggctgccggtgctgcctgagcagcgactgccgcaggggcagccggagcagcaggtgcctgcatagctgccggactcggaacagagccagcgttcagcataatatccagagcactgcccgggaagtctacggccttgtacatatcctcctgaatccagttcttgctcttaccgtcgtcgaaggtgccttcgatgtgcaggctatcccaggtctctttggttgggttgttccacaggaacagcttaatctcagaggcatccagggctggcatcttgataggctcgccggtgttcgggtcgaacttcggaatcgggcggataccggacaggtccacgatgttagacttcttgcccgcagcactggtgtgctcatcaatcgggaaggtgaaggcctggcccagacgctgtgctgcatgcttaatgctattgtcgtagttgagcttgtcgaagaacttcttgaagcctgctcgctcaaagttactgatagccatcgggtacgggcggatacgcttcacttcaccgttaggaccgtacaccacaataccgatgcgcacgttagccactgcaggcttaccagtaggcttaccgcccttagttggtaggcgcttaccgatttctacgtactcggtgaagtagccgtagtattcgcccttcggaagcagtacatcctcatacgcaccgccctgtgaggtttcccgcatatctacatcttgggtttcgattgctgcgtctaccagagcgttcaaggatgccagtacattagtagtcatataatttatacctcgttagaaaagtgtttgtgatgctgagagataactgcttgccttgctaagtgggcctcttctgcggtagcgtagaatcctaggtggtattgtaccccatctgtttgtatgtaggcacgccacttaccattgcttttacgataagacactccacgataccccgaccgggaatccttccgcaatcctgcattcttcgcgtttcctgctttattggcctcccttaaattgacccaccgattatctgtacggtttctgtttacgtggtctataacgttcggccaacgtccgcacattaaggcgaaggccagtcgatgtgcaaagtattgcctacccttcacacttactaccccgtaaccatccttaatgtaacccacagcctcggaaccgtcaggcctatgcaatttccccgattcggggtcataccgcaaatattgcggcagagaagtagcgtgcatataccctctcgtttagttcaaatgatatttacgtgcagatgcaggacaggcctagcgattcttaagtgcggacttaatgcctgcagccgcggctgccgccacaccgcctgccgccaggattgccaacagcaaagctacaccgccgtagaacggaagcagcacccacagccaggaccaggcgataaccccggtcagtttcaaggttataaagataagacccagtacagaacagattcccattttcattggtacccctaattaggttttgattatgtcgccaacttttaaactcagagctgaggattcatctttataccaccgctctgtctcagatttgtgcccccagcagtcatactccagggttacacgatacacctggtattgctcatcccatacgggcgcacccactcgggtgacggttgcgtctagcaaattcatttgcttctccctacccatttcccggaatcgtcaagtaacatggggatgatttgcgggcatccatctgtaatcaccatacaccctagaatcggcttgcttcttgacaacttaccataagcaaaggccagactcttgttgtcgattaaacaaccgcagtgcgcaccaaagtacagggcagtgctgctagcggcatactgtatatctaacttcccatggaagtgtccaatcaccatggacttacgttcatgggctgcgttgagcagcaggtccccagatacttgatgttggaatcgcacaatacccagtggagtattcaaatcccaagcatcgccccaactccacccgggggccccatgctctgggaacaggatgtcccggtacttcttaatgaactgtacagggagtccatgagctttggctctgcggtagacaagagagccgtggttagagtcgcacaggagcaggttaggaaacaggttatgcagccgctccaggccaagcttggccttctctaactccaccccagcactatccaactccggactgctgtcgtgaaagctaatggcgtgcccatccgtctcgtcgcctatctgcacaacaatgtctgggcagtactcgtcccgtacagtgcgcaaaaagtcgtacgcgtccggatgtgtgtacggctcgtgcaggtccccgataacgagaatacgtcgacaggtttccggtacaaacgtatccccaatgtcatccgttggggagggctggattagtttgcgggcttgcatcaaagcattattagcctttgccttgctgcccttgttatccatgaagatgctgcgccaatagcgcacaagctgacgagatacactaatgtccgtgtccacatccccgcgattatccagctcttggttgtagtactgagcagccagagcgttgtctaggtactggcccaggattgcctggtgctgctctttggtgaatagctttattaggctaacacgtgccattattgcctctcttgtgttgttcctactcgtatcacattaattctaggggaatcacagaatcaagccaaagtcaacaaataattttatttaattatttagttgaccctagcatatttccatgctaccctaaccccctacaccacccaagggtacacctatcactactcttcgataagcttgtactccccggggaagaaggtgacgccgtccccgggcctacttactaacagtccagggtaacttagttctatctcaccagtaaccgggtcgaagaatataaccgtgtgccttgtacctggggtgaagtatgctgcatacctcgggtctatcggctcaggcccaagatccatcaactccacaacactgcctgactttatactcattctaccttctccttactgtacatactcgtacccatctcagcctctgctgggaacgggacctcaccaatgataccgtagttaggccagagctggtggatacgcttaggtgcgtcctccatgcactgcttaaccagcaagctcgcctcacgtccaacctctgggttggcgctgtccagatacagcgcatcgtgcacgttcgtaatcaggcacacctgattgtcgaaccagtcacgggccaagagtgcacgcagaaccataccagccgccaccgccatcaggaagaatgcttccccttggcaccagtagttcgccatctcggtttccttgtagtccatgaccttctgcttacgctgcccaggcacaacctccttccactgctctttctgacggaagctgtagcgggcaccagcagggctggtccacgtcccaatgcggtagattcgatagctgccgtcgtccgcctgctcccggtacatgcgaccctccgcaccggtacgctctacctcttccttaacaacagcgcggaagccaattgtttgcgggaacagcgcagcctcgttgtccaagaaagcctgtgcaaattccaccgtacatccagtagcaaacgcaatccccttagccgtagcgccatactgggctgcaaagctaggagccttaatacttgtacgcattgccttccaaagcggatgcagctcgtgcttcttgttgtggcagcgctcatatacttcttcatacggtaatccttcacggaaagctaggcggtaacagtgcatatccgtacctgcctgtagcaggcccagcagtttcttatcccctgtatgcacgcaggacataaccacttccagcgcagagtagtcaacctcagtgatgcggccgttatcaccgaatcggctggtgaatacctgcttcaccttggatttagccaccccatccccgtcctcatccgggcggggtaggttctgcaggttcgggttagaactactaaggcgcccggttacggtggcacaggtattcaggcggtggtgtatgattccggaaccatcaggacgttcagggattacgtactgcagcattcccttccgctctttgacttctccgtttgcatccagaacttcccgcaaatagtaagtaccagtgtccttctcgagcgccgccagctcgtttaccaacttacagaactcgaacccttggcgagccagtgcctccattgcgtcagtgctggtgctgtatactggcgtgccgtcatgcagggtacgcgcctgccggaactctccgcgctctgcgtacttctcccggataacttccggaagctcctggatgtccactaggcccggacagaagtaaaggtcatcctcccacttaagtttctcctcctctgtatcaaggcggaatacttttggcagccccttgttcttaccggacttgtacgtggttgcaccgggtggcgcgggcatgtcgtccacggcaacccaagtgtccccgacttgccaatagtctgccttgacatactgcggggggaaatatggaaccttcttgcggtacttgataggtccgccgtacaccagtgcagacatatggaagtccgaaccgaagttgaaatccagcgtctccggcaagtccttcgggatgtactgctgcagctcctgcttaatctccaggatgcgctgctcctgctcttcttggttcttgcgagcaatcggcatattcacgaacaggccgaaccattcgcagtacgcccaagccagcaaggcatccatgcgctcccacacgtactgcatctgattgcgctgggcgaacgtagcgcactggccgtagaagcacagggccgtgttcgggatgtccccgttaaccaggtagtcgtgcagtagcatcgggtcaatctgggaggttagcacaccctgctcccacagaagcttaaccccgtctactttgtgcgtaccaccgtacttaggagccgtctcgtccagcgacggatacatgctctgaaagtccgaggcgatgtattcagaatgcatcgtacagaatacgcgacctccccgctttaggaaggcctcaaactcggcgcgcgcaaaggttaggaaccagctaatctcatatgcggcgttgtgagccacaatcagccaacagtcagctggtattgggagccattctgatacaggtgccgcttcaaagtgcgcgcgactgttataccgtacactctctacggggcctacttctaccgtaccgtcatcgtgcgtgcggtcaatacgccacgctgattctacgatgtaattatccggacagtacggggaagcaacactaccgtaatatgggtggttttgcgtctcataatccgttatcaggatgcttctgctcattccataccctcccctttatgatattagatatgtatccttgacttgttccgaagcgtctcgctatagatatctgggtctcaccgccagcgtatgcttctcgtatgctgtgcacgtcttctggggtaagtctggcagcagggttgcggctgcccagcaaattacgcgcacctttatttcggtcctgcatattatcgctaggagtccctagtagcaggtgctccggatttatgcaccgaggattgtcgcacgaatgccggactacaagtcccgcgatatcgctcagcttcaagttgtgggctatacagtatgctttgcggtggctgccagttgtcttcccgtcaaatctggagcggccatacccagcgccctttcctcggcaagtgcttcccctctgtccgtggtcaatacaacctgtcatttccacttagccctccgagccttgttgatagccagatgcacaatcagctggctgctgtccagtgcgaatcgtttacggaaagtacctgcagatgcagcgtacgccttgattacctcgtcgtctaggtagttgatgtctgacggtttaagcatactagtaaatctcccagcagtgatataggccctacaatatcccactctctctgattgtaacgtgccccgagttccacggtacaaaattccccggtaacgcggtgtcgcaccacgtaactaccgcgtataagtcctgtgtaatccactttttggataacccctgtatagtctacttgcataaatcctcctgtgtacctacatagcgccctcgtagaaggcgctagggaagtcacttgattggtggcggaggttcgatagcctccagcagcggctgctgcagtaggtaagtgttgtactcctgtatcgcttgtactgccaacccgcgcaggcgcagtgcttcgtttacgtcccaagcagcaccggtggatacaagagagaacgcatcagcatcaaagttgaatgtgctctccttagattcagtcagtcctatgtaggcgccgctttcacttacggcgcacacagtgtaagtcctgccaatcttcacgccagtgcggtagaatatatcacgcggcacaacggtgctgcgctttactttatcgccaactttaaacttagacattaatttggccctcatcaaatctacaacgacccggctcgaatcccacctcgaattgcaggagcgattctttaccagacagtgccatcttgttcttcggagtactgataccacggacgttttgcatgtgcggctgctcgttcctgtccaagcatcccatcataatcgccaagtccaaggcaccctgcacgccaatcttgctctgcttcatagcggtgagcggcgggaacagcatgttgtaaccttcgagtgaaagctgcatagtgcctacaatagcgcagtcgttctcgcacccaaggatacgcagctcctgccatttcgcctcaaggttctggtgctcactctccatagtgccaccacggatattcgccaccatgtcgatgatgattaccgcggggcgcatctcctccatgagcgtggatatctgcgccatcgtcaatgagtgcgcagccttaacacgaatccggtcagccctgcctactttcttgaggtaggctggcacgaactcttgcttactgtgtcggtccttaatctccgccagagtccaatgcagcgccgcttgatatacccgcggcactgtgcgcgtcgccggaccctcgttaacaagccagaggatagggcggtccccgtacacttccggctgctgctgcatttgctcagcaaaatccacagcaatagcagcaagcagactagttttaccagagtccacaggagcagccactgcgatacagtccccgccacgtagacctcggatgttgctagcgagttgctcgaacacgcccagtttaagaccgccgctctcgtcagtcgcggcaagtatttcgtcaacactaccgctctcccattcaagcagcgaatcatgaacagcagcaccgtccccgtacttgcgctggaggtgcttcatttccagcaggtaatcaacttcctccccatcctgatagcgttgcgtcagcgcggctacctccccgctgtaggccagctcgttcagggtctggacaatccccaccacagaatcctgcggtacggcctgtactccccgcataagctcgtccatgattaccctctcttcccgggataagtgaccggcccggaggttgagcatgctctgcatcgcatcccactgcacttcctggtgctccgggtacgtgttccagtacaaccccacccagtctagtaggttcgacgtatccggcgcgagcatggacttgggtatctgttcacgcagtcggttccacaccttctgcgtgcacattgcacgaacaactattaggtccaattagagcctccaagttttagctttcaatacatcgtgcactgctgacacacttacaccaaggctagcagctatggccggtgtgccgtgttccctgctgtgccgcctgtaggtcttcctgatatagtccacctgctgcgctgttagcttggagtacccattctgctcccctttagaaactccacgtctagccctaccccgggcaatacagtcatggacgttatccttgaccgtacctaattctaaatgctcgggattaatacatctcgggttgtcacacttatggcgcacaactagccccgctatgctctccggagatatatcgttcgccgagcaatacacctttctatgcaggggtatcttccgccctttgaacgtggtatttccgtaaccctttggtccgcctttctgtttgtgctctttacacgcgcctaataccatctaataactcctgtattgttgcctcttttgggtccccgtcgtagtagatttcgtggcacgacataaagggacgtagcgcgcgccgtatcatggccgcgccggagtgtcccgcttggtcattatccagggacagtatcactgtcggtttgttctgtatcagccacgcccttaactgcacgggcaagcgagtacccagcatagctatagcctgcacgttcattgcagagtagttcgtaatcgcgtgctgatatttgatcgctgatagatagtcctcggtgagcacgacctttagaggtgcggccgcagctacatccggtgctacggcaggtgccgcggcagcgaatggtattggttggccgtacattacccacttcggttgctgtcgagcatgaactgcacgacccagagcagcgcttccgacacggaagattatccgctgtttctctttgctccattctgcatcccccaccatttcaggcatgattccctttgtgattaggaatccgtaaataaaactctgcgtttccgcaggcgcttggctaatgcaaattgcatctgcaggtgcagagggctgcaccctcggctcttcctgtaactgtatgcgctggtactgcttgtgctccttgcccacctgcttgcagcggtggcaatagtattcccaggcatccgggttattgtagagcaccccggcggcgtccctgccgcagcaccgaaagcgagccctctgccctacggccaggcgcttgcacgctctaagccagggctggtccattacttaatttccagggtagtggcgtaagtcaagtcgggttgcctaagaatctggtgctcgttcaacagcaccggtgccccgtcatgcaggtagaacatatccccaccaggagattttatggcccagtaaatctttgcaccccaggtaaatggaactgccgttctgggggcatcaggcaaggtactatagtttatggtactaggcatttgctttctccttccgtttgatttccatagccatgcggcgcaggtcgtgtgccaactgcagggctgaatcggggtcgatgttaatcccaatctcaacctttgcccgagtgcttcccttcttaggaactaccccgatgtacattaaaccttccccatccccattatccttctcaagaactaggcgttggtcatttcccgggtcgcgcttagagttcatgtaggccaccttgtccgggactggcggcagctcatccttcgggtcttgatacagctcgaagttatcggcgtaccacgggtaggggtcggctcctccatctgtaaagttatccaactgcagccagtggccgcttgtagctatatctgtaattacgtagtaagcaaaatcccctaggtacgacttgagcgacgaattgtttttgtgtgctttgcgaacaactttatcaccaactttaaacttagacataatcaaccctccacaatattatcgtatccgccccagtcttctacgactcgggtgcctagttcaatcagttcttctttaaagccgtaatcggagaacaccattatgtactccgtcgccttctctggattctcctgcacccagctaatcagttgctgcttagaaagttgtgatacctctcggaacgctgccagtaactgcgggtcctcagcaggcggcatgtcccacggctgccgtaaactgagcgttggtgcagagagccattggtctggttctactaccctaggatcccgctcaatcggaaggtgcgagaacgtgccatcttgtagtacacgctcaagcacttgccccaggatgttcaggtccagtacctcatccggggtgtgctcgtgcatgtaccctacacctacgttggtgcactcagggatgatgccaacgaactcggctgagtcagtgtacacccccttctgtaagtgctgctccgtgcgtcccaggcgctctgctagggtcttggcaaaggtgtcagagcagcagcgcatatacctttgatgcgtaatgataccgtcgccgcggcggtcgaagctgatcatagccttgaccccagtccaaaatccagagtcatccttaaccgatgcagcgctaccctcgcagccaacctcttcgtccacgaagaagcagtagcgtccgtgcac

SEQ ID NO: 46 - DNA, 44804 bp, Unknown
  source: /note="Description of Unknown: KP2M-P0206 Bacteriophage sequence"
aaagctacaccgccgtagaacggaagcagcacccacagccaggaccaggcgataaccccggtcagtttcaaggttataaagataagacccagtacagaacagattcccattttcattggtacccctaattaggttttgattatgtcgccaacttttaaactcagagctgaggattcatctttataccaccgctctgtctcagatttgtgcccccagcagtcatactccagggttacacgatacacctggtattgctcatcccatacgggcgcacccactcgggtgacggttgcgtctagcaaattcatttgcttctccctacccatttcccggaatcgtcaagtaacatggggatgatttgcgggcatccatctgtaatcaccatacaccctagaatcggcttgcttcttgacaacttaccataagcaaaggccagactcttgttgtcgattaaacaaccgcagtgcgcaccaaagtacagggcagtgctgctagcggcatactgtatatctaacttcccatggaagtgtccaatcaccatggacttacgttcatgggctgcgttgagcagcaggtccccagatacttgatgttggaatcgcacaatacccagtggagtattcaaatcccaagcatcgccccaactccacccgggggccccatgctctgggaacaggatgtcccggtacttcttaatgaactgtacagggagtccatgagctttggctctgcggtagacaagagagccgtggttagagtcgcacaggagcaggttaggaaacaggttatgcagccgctccaggccaagcttggccttctctaactccaccccagcactatccaactccggactgctgtcgtgaaagctaatggcgtgcccatccgtctcatcgcctatctgcacaacaatgtctgggcagtactcgtcccgtacagtgcgcaaaaagtcgtacgcgtccggatgtgtgtacggctcgtgcaggtccccgataacgagaatacgtcgacaggtttccggtacaaacgtatccccaatgtcatccgttggggagggctggattagtttgcgggcttgcatcaaagcattattagcctttgccttgctgcccttgttatccatgaagatgctgcgccaatagcgcacaagctgacgagatacactaatgtccgtgtccacatccccgcgattatccagctcttggttgtagtactgagcagccagagcgttgtctaggtactggcccaggattgcctggtgctgctctttggtgaatagttttattaggctaacacgtgccattattgcctctcttgtgttgttcctactcgtatcacattaattctaggggaatcacagaatcaagccaaagtcaacaaataattttatttaattatttagttgaccctagcatatttccatgctaccctaaccccctacaccacccaagggtacacctatcactactcttcgataagcttgtactccccggggaagaaggtgacgccgtccccgggcctacttactaacagtccagggtaacttagttctatctcaccagtaaccgggtcgaagaatataaccgtgtgccttgtacctggggtgaagtatgctgcatacctcgggtctatcggctcaggcccaagatccatcaactccacaacactgcctgactttatactcattctaccttctccttactgtacatactcgtacccatctcagcctctgctgggaacgggacctcaccaatgataccgtagttaggccagagctggtggatacgcttaggtgcgtcctccatgcactgcttaaccagcaagctcgcctcacgtccaacctctgggttggcgctgtccaggtacagcgcatcgtgcacgttcgtaatcaggcacacctgattgtcgaaccagtcacgggccaagagtgcacgcagaaccataccagccgccaccgccatcaggaagaatgcttccccttggcaccagtagttcgccatctcggtttccttgtagtccatgaccttctgcttacgctgcccaggcacaacctccttccactgctctttctgacggaagctgtagcgggcaccagcagggctggtccacgtcccaatgcggtagattcgatagctgccgtcgtccgcctgctcccggtatatgcgaccctccgcaccggtacgctctacctcttccttaacaacagcgcggaagccaattgtttgcgggaacagcgcagcctcgttgtccaagaaagcctgtgcaaattccaccgtacatccagtagcaaacgcaatccccttagccgtagcgccatactgggctgcaaagctaggagccttaatacttgtacgcattgccttccaaagcggatgcagctcgtgcttcttgttgtggcagcgctcatatacttcttcatacggtaatccttcacggaaagctaggcggtaacagtgcatatccgtacctgcctgtagcaggcccagcagtttcttatcccctgtatgcacgcaggacataaccacttccagcgcagagtagtcaacctcagtgatgcggccgttatcaccgaatcggctggtgaatacctgcttcaccttggatttagccaccccatccccgtcctcatccgggcggggtaggttctgcaggttcgggttagaactactaaggcgcccggttacggtggcacaggtattcaggcggtggtgtatgattccggaaccatcaggacgttcagggattacgtactgcagcattcccttccgctctttgacttctccgtttgcatccagaacttcccgcaaatagtaagtaccagtgtccttctcaagcgccgccagctcgtttaccaacttacagaactcgaacccttggcgagccagtgcctccattgcgtcagtgctggtgctgtatactggcgtgccgtcatgcagggtacgcgcctgccggaactctccgcgctctgcgtacttctcccggataacttccggaagctcctggatgtccactaggcccggacagaagtaaaggtcatcctcccacttaagtttctcctcctctgtatcaaggcggaatacttttggcagccccttgttcttaccggacttgtacgtggttgcaccgggtggcgcgggcatgtcgtccacggcaacccaagtgtccccgacttgccaatagtctgccttgacatactgcggggggaaatatggaaccttcttgcggtacttgataggtccgccgtacaccagtgcagacatatggaagtccgaaccgaagttgaaatccagcgtctccggcaagtccttcgggatgtactgctgcagctcctgcttaatctccaggatgcgctgctcctgctcttcttggttcttgcgagcaatcggcatattcacgaacaggccgaaccattcgcagtacgcccaagccagcaaggcatccatgcgctcccacacgtactgcatctgattgcgctgggcgaacgtagcgcactggccgtagaagcacagggccgtgttctttatatcaccattgactaggtaatccctgagaagaatggggtctatctgcgaggtcagaacaccctgttcccacaatatttttaccccatcaatcttatgctccccaccatactttggcgcagtttcatccaaggatgggtacatactctgaaagtcagacacaatatactccccgtgcattgtgtcgaatacgcggccgccgcgctttaggaattcctcaaagtgttgccgctgatatgttaaaaaccagctaatttcgaaggctgcgttgtgggccacgatgcaccagcaatcagaaggtatgcggaaccacagatgctccccggctacgtcgtcaagaaattcctgcttgctgttgaatctgatatcaaaggtcggttctacggtaactgtgccgtcatcctcggtccggtctatgcggtaggccgaatgcactacatagttgtcagggcagtaggggctagccttgctaccatagtaaggattattctcgacctcaaggtctatagtcataatactgctagtcatactgcaaccccgtgattatggtgataccccgccgcctcagctgccagtctacgacactctacggcttgctctatactgctaaatgaacctaattgtttatttcctagggttgctatccaacgacctctcttcctgtgcacccctacatagccgctgcggttgcttctatacagggacttgttctgcatgttcttctcaggaagcactgccctcaagttatctggggtatcttctaacctgttatgatttatgtggtctatatggtggcctgctcgcagcggaccgttgtgcatctcatatactatcaaacttcttttgtatagcttattatgcagcttaacgtaccagtatccatgtactttgttcagagttcctgcctcggaacctgcggcgcagtttaggtggctgcgtccgcgcccacttctaacctcgtgcttccagtagagtttgccgtctttgtaggtaaaccaaatatcccaattcatttccacttagccctccgagccttgttgatagccagatgcacaatcagctggctgctgtccagtgcgaatcgtttacggaaagtacctgcagatgcagcgtacgccttgattacctcgtcgtctaggtagttgatgtctgacggtttaagcatactagtaaatctcccagcagtgatataggccctacaatatcccactctctctgattgtaacgtgccccgagttccacggtacaaaattccccggtaacgcggtgtcgcaccacgtaactaccgcgtataagtcctgtgtaatccgctttttggataacccctgtatagtctacttgcataaaccctcctgtgtacctacatagcgccctcgtagaaggcgctagggaagtcacttgattggtggcggaggttcgatagcctccagcagcggctgctgcagtaggtaagtgttgtactcctgtatcgcttgtactgccaacccgcgcaggcgcagtgcttcgtttacgtcccaagcagcaccggtggatacaagagagaacgcatcagcatcaaagttgaatgtgctctccttagattcagtcagtcctatgtaggcgccgctttcacttacggcgcacacagtgtaagtcctgccaatcttcacgccagtgcggtagaatatatcacgcggcacaacggtgctgcgctttactttatcgccaactttaaacttagacattaatttggccctcgtcaaatctacaacgacccggctcgaatcccacctcgaattgcaggagcgattctttaccagacagtgccatcttgttcttcggagtactgataccacggacgttttgcatgtgcggctgctcgttcctgtccaagcatcccatcataatcgccaagtccaaggcaccctgcacgccaatcttgctctgcttcatagcggtgagcggcgggaacagcatgttgtaaccttcgagtgaaagctgcatagtgcctacaatagcgcagtcgttctcgcacccaaggatacgcagctcctgccatttcgcctcaaggttctggtgctcactctccatagtgccgccacggatattcgccaccatgtcgatgatgattaccgcggggcgcatctcctccatgagcgtggatatctgcgccatcgtcaatgagtgcgcagccttaacacgaatccggtcagccctgcctactttcttgaggtaggctggcacgaactcttgcttactgtgccggtccttaatctccgccagagtccaatgcagcgccgcttgatatacccgcggcactgtgcgcgtcgccggaccctcgttaacaagccagaggatagggcggtccccgtacacttccggctgctgctgcatttgctcagcaaaatccacagcaatagcagcaagcagactagttttaccagagtccacaggagcagccactgcgatacagtccccgccacgtagacctcggatgttgctagcgagttgctcgaacacgcccagtttaagaccgccgctctcgtcagtcgcggcaagtatttcgtcaacactaccgctctcccattcaagcagcgaatcatgaacagcagcaccgtccccgtacttgcgctggaggtgcttcatttccagcaggtaatcaacttcctccccatcctgatagcgttgcgtcagcgcggctacctccccgctgtaggccagctcgttcagggtctggacaatccccaccacagaatcctgcggtacggcctgtactccccgcataagctcgtccatgattaccctctcttcccgggataagtgaccggcccggaggttgagcatgctctgcatcgcatcccactgcacttcctggtgctccgggtacgtgttccagtacaaccccacccagtctagtaggttcgacgtatccggcgcgagcatggacttgggtatctgttcacgcagtcggttccacaccttctgcgtgcacattgcacgaacaactattaggtccaattagagcctccaagttttagctttcaatacatcgtgcactgctgacacacttacaccaaggctagcagctatggccggtgtgccgtgttccctgctgtaccgcctgtaggtcttcctgatatagtccacctgctgcgctgttagcttggagtacccattctgctcccctttagaaactccacgtctagccctaccccgggcaatacagtcatggatgttatccttgaccgtacctaattctaaatgctcgggattaatacatctcgggttgtcacacttatggcgcacaactagccccgctatgctctccggagatatatcgttcgccgagcaatacacctttctatgcaggggtatcttccgccctttgaacgtggtatttccgtaaccctttggtccgcctttctgtttgtgctctttacacgcgcctaataccatctaataactcctgtattgttgcctcttttgggtccccgtcgtagtagatttcgtggcacgacataaagggacgtagcgcgcgccgtatcatggccgcgccggagtgtcccgcttggtcattatccagggacagtatcactgtcggtttgttctgtatcagccacgcccttaactgcacgggcaagcgagtacccagcatagctatagcctgcacgttcattgcagagtagttcgtaatcgcgtgctgatatttgatcgctgatagatagtcctcggtgagcacgacctttagaggtgcggccgcagctacatccggtgctacggcaggtgccgcggcagcgaatggtattggttggccgtacattacccacttcggttgctgtcgagcatgaactgcacgacccagagcagcccttccgacacggaagattatccgctgtttctctttgctccattctgcatcccccaccatttcaggcatgattccctttgtgattaggaatccgtaaataaaactctgcgtttccgcaggcgcttggctaatgcaaattgcatctgcaggtgcagagggctgcaccctcggctcttcctgtaactgtatgcgctggtactgcttgtgctccttgcccacctgcttgcagcggtggcaatagtattcccaggcatccgggttattgtagagcaccccggcggcgtccctgccgcagcaccgaaagcgagccctctgccctacggccaggcgcttgcacgctctaagccagggctggtccattacttaatttccagggtagtggcgtaagtcaagtcgggttgcctaagaatctggtgctcgttcaacagcaccggtgccccgtcatgcaggtagaacatatccccaccaggagattttatggcccagtaaatctttgcaccccaggtaaatggaactgccgttctgggggcatcaggcaaggtactatagtttatggtactaggcatttgctttctccttccgtttgatttccatagccatgcggcgcaggtcgtgtgccaactgcagggctgaatcggggtcgatgttaatcccaatctcaacctttgcccgagtgcttcccttcttaggaactaccccgatgtacattaaaccttccccatccccattatccttctcaagaactaggcgttggtcatttcccgggtcgcgcttagagttcatgtaggccaccttgtccgggactggcggcagctcatccttcgggtcttgatacagctcgaagttatcggcgtaccacgggtaggggtcggctcctccatctgtaaagttatccaactgcagccagtggccgcttgtagctatatctgtaattacgtagtaagcaaaatcccctaggtacgacttgagcgacgaattgtttttgtgtgctttgcgaacaactttatcaccaactttaaacttagacataatcaaccctccacaatattatcgtatccgccccagtcttctacgactcgggtgcctagttcaatcagttcttctttaaagccgtaatcggagaacaccattatgtactccgtcgccttctctggattctcctgcacccagctaatcagttgctgcttagaaagttgtgatacctctcggaacgctgccagtaactgcgggtcctcagcaggcggcatgtcccacggctgccgtaaactgagcgttggtgcagagagccattggtctggttctactaccctaggatcccgctcaatcggaaggtgcgagaacgtgccatcttgtagtacacgctcaagcacttgccccaggatgttcaggtccagtacctcatccggggtgtgctcgtgcatgtaccctacacctacgttggtgcactcagggatgatgccaacgaactcggctgagtcagtgtacacccccttctgtaagtgctgctccgtgcgtcccaggcgctctgctagggtcttggcaaaggtgtcagagcagcagcgcatatacctttgatgcgtaatgataccgtcgccgcggcggtcgaagctgatcatagccttgaccccagtccaaaatccagagtcatccttaaccgatgcagcgctaccctcgcagccaacctcttcgtccacgaagaagcagtagcgtccgtgcacaccccgccgcagcatctccagcatcaggtagataccagcaccgcagtccgcccccaagcagtcagcttgttgcggattctttacgaacagcacgcccttgttagtgcagccgacgtccggtgcagcgctggttgggcgcgccactgtgtcgaggtgcgacgtaaacgctacgtcactttgttcggagtccccgaccagcacgaagtagttcccgtgcttgtcctttacgtagtgcataccactacccagcgcctgcataagcagcggctcaaaccacttagtgctgccccagctaggccggtgcgtttgcagtatctgcaagagcagctgcatatcaatcccatgcggattcaagaacattaagctgcctcctctatttcttcatcgtcgttgcccagatacttctcccccaagcaatcggctgcatactcagtgagaatcaacccgtgcacagggtgttcttctgcgtgctcaataagcacctgtcggtcctgtgcatacaccagttcttcttggtcatgcactaccccctctaccgaacagtgctcaatgtctccgtcgtatacataagcgtcgtggtaatcagaccaagtgcaactccatcgattatacagaccctcgcgcccaactacgtatacaaactccccctcttcgaggcagccgtcgcagaccatttcataatcggcggtttcgtgcatatcatcaacggagtagcgccccccgcagcagcagcaccgagcagattctgtgccgacgtagatgtacccttctgattcttgcgcctcgtactcgtagtcgtcacgtattacaaaggcgtcactgccttcttcgtctacgccacgctggctgctatcgagatatggcatcagcactgcgccgttgtaggttgggtgcggtatgcgtgccagcattaccccctcgagacattcagtgtttctggtgtacccatgcccccgcaggattgcatccgcagcgttgccgtaagcacggacgtactctttggtttcaggttttacgattgctcgtgccagcacttcgaagtcgtccccgaaaagctccccggtatactggatgaataggcgcaacccgttatccggcaacccgtggctggtggtggcgtacgtccgcacagggctatgcttaaatgagtacccgctcatgcagctacccgggccattctcgtaggcgtcgtaccattcctgctcggtcttgcacaggtacgttgtagggtctacgttcatagccttgaggtcttcgatagcatcgcggaagtctaccccgtttccgtagtagttagcgagccacttaccgacgcgcatctctacgcaacggtactcattaactgcggcgaagtccttatgcatccgcggctgccccagcatcacgatgggctcaccgttgcggaaaccaaagcccaaaggcacggcgaatctagacactacgaagccgtgcaacttcatgagcagcgcagcggcgttgccatcgcggaggtggcgtccgtaatcgtagccagtgtactcctggcgctgccgctcttctggtgcaagcataatgcgctcgaataactgcacggcctgcttgtgcaccttgtaaccggtgaactcttctacactagcaactacgcgctcaaccactacatcatcgccctcatagaagtcgcggcggcgttcccagaacttgctgtcgatggtgattcgcgccggggaaaagagttcgtagaaagttccagaccggtgcaggtctaccttttgcaacgggccgcgagtcatcattacttcgcggtactcagggtgcagtatcccgcctatagtcacctctaagccaggggtgtaagcgctgacagtgcggagacccataagcgcctgcagcggaccctcattgtgagggtggtcagaaccttgcatttgcaagtcctggaacggggtccagtaatcaccgctggaatacatcgaacatttcattggcagtgcgtttgcaccttccggcaacactactttccattcgataggtgctgtgccagtttctttgatagtctcttgcattttcatttgctcccgagttaattgtattgcgtcgtgtattaatagctcagcgtgcataccacgcagcgagttgtcgttgcttataatatgagcgcacagccgccctaaatcttgtataggctccacgatacccgtaccgtagtagtgctgcgaccacatcaaactcaatgtgctcttgcaactgccgcgcggcagattctgtatactcgcggtacgtggggagcaccaccgcagagtcctgcttacgaactcggaggagtctacgctcgactggtacgattttcttgagctcattaggaacctctttgaatgtttcccacggacacccgcacttgccttgtgtctccagcaagcgccagataaacgccgcggtttcgtctacagttagcataggcttctcttagtcacgcagtttcgtgccaccaacacaaaagccggagaggtgataacgtcacctgctcggtaactgctccgcattaatcccgcagaggttaaaagtatgcggcgctcattaattgccccttctaaagggatgagataatacagaccgctataggtctcccggtacacgtcatacttcatactacaccccgcacattaaaccggtaacagtagccgcgcagggtcatacccagtcgctttgcttgtttctcatagtgctgtcgcagtcccgcctttgcgctgtactcccgcgccagcccgtcgattgttggttgctgcttacgcatcagcagcgtttcaggattctttccgtaagccttcatgccgtacccccactgacacggcgcacgcacatgagcttagtgtaaggcccaaaactatcatagcggcgctctgcatacacagctactacgtcatcggaaaccttgacctcttcgcccaagtatcttgcaggcaaggacttgtactttccagtgcaatatgggtacttgatagcgccgggatttgcatccgcaatacgcaacgcctcagatttacgaatgaactttaagactttcatagccgccaacacctctcaaatttcgttgttgctcttaccatccacagtgagcgtcaccgcggcgtccgggtactgctcctgcaccgccgcaaggatacgcgcacccagctctttgcagccgccctccgggtattcgaataggtcgtactcagggcgtggctgcagttgctgtgttgctggctgctgcaattgcacagtacagtagggcaccgggttgcttgcgtcatttcccagcaccagcatagcgctggtcacaatgatgttgaatacattaaccatagagttgtctccagtcgttgataatgccaagattcacggcgtccagcacagtgcgggcagccatttcggtgtaggtatccacaaattctaaaggggattcctgattagtgtctttgtcagagaatataaccacagtgtagctgtattcttcgtatatccgattgcaccacacgggccagagttcatggcccggatagaccagtattgctttcatatgaaacctcatacgccagttgcattcacatagcgccccgtaggacgctataggcttgctactaggccactgccttcaaagttgcgtccagcacagcacgtacatccacgccctgattaatgagcatactcaccaaatctgcgtcgcttacgccagtctctttggccttcttaatggcgtttttaacgcgccccagcgcttgcaagcgcactgcatcagcgtccagcgcgtcattcttcacctgctccgcttcggcagcgtacagggccatacaggagctatagaagctggcaacaataacttcgcggccctgcttgtcagcttgtttgtagtcaagacgcatagtgtccagttcgattcccagcttctcagccgacgcatagcacttcttagcgttgaactcgtacttaccggactctttgttgaacttgatgggtaatagcgtacgcagcaccatatcaaagtcagcagcgtcactgcgctgcatatccgtagcccaggaaacgttgctgctgataagaccgtggaagagcgcgctgatagtgatgttacgctttgcttccactacgtcgcccagcgctttacgaatgctacccgcagcggtgagcttgaatactttaccagttgaatgggtcataatacacctctttgattgatttactatcggttaatttcacatagcgccccgtaggacgctataggctattaaccttcaccgtagccaaccatttggcacctccctagttgcttagataattactccacatagcaccccataggatgctataggctgtaattagtgcccaaattgggagttaacagcaggccacccactaggctgtttactgccgcccttttgtttttgctttcccctcaccctgtgctcaccgctcaacccttgtttgctgggcttcacagtaagcggcacgttatcggtggggttaagtgataactgcatattccgccgtaatgctaggcgttttgctttgcgcataatctcacctctcagagtacataatctagcgcagccttgttactgctacgctatgttatatgctctttgcggggtacactccgcgccttgttccctcgattcagaggagcgagctgctctcgcctcggcagtatggtttgcctcagaaccccggtgataacgtccggcacgcttactctttttaactgattatctaggctcggtcgtcatcgtaccagtcaaggtactgggcctccccgcaaatcagcttactgcttgctatctaagttactcagttaatcggaacttgtcaagcgtttatttcttactacttgctggctgtccagctcggggtattcggtagttcccaaccagcctgtttccctaaactccgatgagcatcacttcttaggggttatctcgctgttagcctctcagcgccctatcgtggttagggttccaatcgcgcatttactgttacacgacatattcagttactttgggattcaatctagcttatgttcttcgcggtgtcaactctttttatcgagtgtctaacccttcacactatctagccttaatccggcggagcctcccggctcggctccgttcagcacctcagcgcctcccggtgattgaactatagccccattgaaccaaaagaagcaagtaatattttcaactttttatcactaagagcaaaaagggtaagcagggcaaatacttagagctgcacttagaaccacactagggatagctctaggggtactctaaccactactaaccatactgcatagtactgcatagagcgtagcgtagtgacgtaacgtaagtgaaggaacgtagtgtagcgtagttaatgcttccctccctacggtcggtcatacagggcattactagtgagtactagtgagtagtagtgtatatagtgccctaaacccctcctactccggttacttcatttcataatagctttcgaatgaaagtaagagcaaagggatagcgctgggatagtggatgtgcgccctagtggggagcgcgcagcgtagcacagaatccgcgcaatgtaaagcactaaggatagccagtggatagcctagtgcatactagggatagcactagggacagcactacagcgcactagctggcccactatggccccactactggccccgctggacaggcacaaaataagcaaggcagagcacgcccctatggcccacagggagcgcacagggatagccctagcgcctcatagcacgcactgagagcgcacaggaagcgccctagtgaacgcacaaggacaggcatagggtagcactagcgatagccctagaacgcagcacaggcccgctgaggccctctggtgcgcactagcaggcccacccagtgcccccccccccccctaaattgacgctaggtaccccctatgggggcaattgggcgcgttcagggtgagggaggggctcgcgtgagtctaataaatttcaggtccaggtatagacctgctcgcctagactgggcctgggctttacgctgtgcgttagaagtgcagcaccaagctagcccgagtagccccaggggtaattgccgcagccccaggattaaacagagtaactttgtaggagctgtacccactgtagctactgacaccagttagcagcccatcaacagacccgttaaataccggagaactcaaaccgacaggggcttgagtaatgccgtacgggagagtctgtacagggctagataccagcgtaccggcagcgacagcaccaggggtccacgcaaggctaaatggaacagaacgagcacgctctactgtaataccatccaggctcagtgtgtttccagtgctgttggtgaagcgcaaatctccgtcacccgttaggctgttacccaagtaaaagtctacatcgaaccaccctggaccagccggtaccgcggcaacagaggagccgccactacccaccgctaaggttatgttaccagtagcgcccgggttgtagactcgcaaggatacgcgcactatagccccgagaaggtgcagcggcaactggtaccgacgcatctcctgacccgcgggaacatccagtgctacagtactagcggctccagccctagcggtacgactagcagcagcagcgccacgcatgtacgcctgcccgataaacccagggccgaacggactatccccgcgcactacgttcatgttcccactgtacacgcgcggagggttgatgcggcaagccctagtactactcagtgaccaggatagaacactgctggcatctgcaatgttcgcatcattgtcgaaggcatctacataaccaccttcaatggtccagaattccccttcgcatccatacgccttgttatcagaaataacaatagggccaacagctccagacctaatacgaatacacccggcatacaggttatggtcggagtccgggcggaagtgcgcaaaaccattacgggtaatccaagagcgcgacagctgtccaaagtccagtacgtgctgtgcagctgtgttagccccgtatggtacactatcccactcaaacttattatccgtaatccacaccaggtccgggttactgtttgctgtactcttaatccatgcgcccgagcacagtccgaacgtgttattctgaatgtgcaggttattgacgttgttattaggaatacctatgtaatccccgaggagtataacgctgccgttagaggcacccatcctacggaataagtttccggagatgtggctctccatacagtcacgtaacaccagcgcagagcccgccaagttattaaaagcagagttttccgccccaaaatagctccaggatgttacctccaccataagtcccgaatcactgctgacagccccctgcagtcgcattctaaggaacccgccgcccattccacgggtgctcgtaccgtcaaagtagaacatcttgctggctgtgctcggtttaacgaatacagccccaagcgggttaacaccctctaggccatcacctataaacagcatagggttagtaaggtggcagtctccaacataataagaccccacaggtactcgcagcacctttacacctttagcggaaatccgctcaatagcggctgcatagttaccggaagaatccggacggagtccggtaagtaccggggcatccttcgctaagtagtcagctactctgcaccacaaatcgtcttggctgtagtaccgtgtttgtacgttctctactagtgccatgtgtcccctcttatcgtttcaattcagccagggctgtgcttacgttcttgtactggttcccgatggctttgctctgccactgcctgcgctcccataggccccagcacactttattgcgctgcccattaatatactgggagcagtcgaaggtccagcggttgctgcccttgtacacccaaccggtgccaggggacttctgctggtacttgctaatatagcgccagtccagtacagcctttccagccgctgcgtaatccaggctcttgagatgccgcttcacagcactgccgttgaagccagctacgcctacgttgtaaatgaagtccacagaccccaccagagatacgtcagagagctgcataggaagcccgtcaagggcctttgcgtgttcccctgctgactgtatcagttgcttctgacaatcgctcagcgtggctctctgacccatcttgacgccctttgtctccccatagcagatagtagggaccccggcgctatccttgtaggcggtaaggctcaggccctcgttgtgctgaaccaccccggtaatggcaccgccaagcatagtggcccccgtaagggccgcaataaccttagtccttaaactcatatttaatagtccccttacgtgcctgctcctctaggagcttgaatgtacgtctcttgtaatacgcattccacgccagggttagcaccgcgcacaccgtcgcagtgatgaagctgatagtgctccagttccagctcattaactctgccaaccaacctcctgacaccgtagcgccggtaactgccgcacctgcccgggtagcgaggtctgccccaactacgtcccctaccttaatcatcctgctgctccttcttcctgaacagcttacgaatcaccagaatgaccactaggaagaccagaggaatgctggccccagctaatccggcgaggataagactgtaactatcattgttaaccacctgcaggcgctctgcctggattgtaccggtgctaatagtttgcacctgctccttactggacgtgtccaaagtgcctacgttagaatctgatacatcggttttgttggtggtgctggagtccaccttgttattcaagccaacggtttgcttggtgttttcggcaccaacctgagcagatacatccggcttagaaccaactaagccggtgagtgcagaggtcgccgagcaaccagtcagagtaaccgcgagcagtaacccagcgaccagtttacgcattagctagcagccttcactgcggctaccgcggcttctagcgcagcaatcttggtatcgaaggtagcacccgtctgggccacgtcctgcggctgcgtaagcatagcatacaggtccttaccgagaatgttcagctggcgcagcagctcctgctgttgcgctggggttgcttttgcaattgccatagtattgctccttactcaacagagattgctgtgattacaccatcttctacagtgatagttgctgctacagtagcggtagcccccgcctcccgagcggtggtgaacgtaataggtgcagttacttctgcgccgtcaccaaccaccactacagcaccaccgtcagaggctcctgcagcagagagtgccgccactgctacagcccctgctgcatctacatccggacccagagtatctagtgggccggtatcatgcgccaaggttgttgctttatcaagcgccactgccgcattacgtactgcctggcgctgtgccagtgttgcttctgcaaatgccattatcttcttcctctatgttgtttatctctgccacggttctgcaacctagcagccacaccccgaaggcccttagacactttgctctgtgcccaatccagcgggttctcaatgaaggcccgagccatcttctcagactcacgctcagccaccactttctcatcttccaccaggtgcccgttcagcgtagccaccatcatagcgattgcgtctgctcggtcgtccttagctaggctaccgcggtcgtacgtgatgccggacaactgcgcgaacgcggagtacagccaacgtctatcgcgggagtatgccatacaggtactaatgtcgtcgtggatagcacgctcgtgcactaccaggcggtgccgacgagtaactgggctgattgtgtcaatgatacgacgctctttctgcgtggagttattcaggtcccttacgccaataccggcgagacgccgctcccgcagacggttcaggataagcatagacacggtaccgtgccccatgttgctctccacaaccatatcctggatatctaactctacgcataggtcaatcagtttatcaatgttctcttcgctgatacctccttggaagccgcctacggagaataggtggatgtacgagttcgcagcaccaccagcagcgtaagacacttcgtccccgccacacccagccgggtccaccaccagcaccttatgctggtacggcaggtgcatgtccccgtagaatgccgggaagtacatctgctggcccataatcccctcatgctcatgctggtacaggtaccggcggtccgcgatgtaggagaacgtctcaggggaggaatcctggctaccagagtaaaccagcatatccgaaagcttgatgcgcgtacgcatttggtcggacagtgtagtgtcgagcatgtactgcagctggaagccttccggaccgaagtccagctccttctcaatcagtgcatcctcgtcatagcgtccggtgtccgtgctctcgcctagcgtcccgtcgacgccgaagccggtgcgtttatagccgcgctcaataagctccaggatataaggagcaagtgtacttccatatcgctcttccatttcaacagacggaatgcgcccgggccacacgcggacctcgaagccgcgtcccggcagggttttatagatactgtccttggtctgcggtgtgcccaggtacagcgtatccccgtgcgtacagatagctgcgaagtctttagaaatcatcagcagctgctcacgctgggtttgcgttaaaccgttcttagtggtctcgatatcatccggaatcagcaggtccgcgcgcttcccctgcagggatgcagtgatacctacacaggctacgctggcggatttatccagcggtttcaggtcgcagttgacatcatagccttctaatgaagtacggtccccacgagtagggtcggcctttaagtagcacagtagaggccaggtttctagcatacgaatgattaagttcgctacgtcagaggcctgcttctctgcaccggacacaatcaggatacgacaggattggtcctggatgagcctccagacggcgtacagtgcagctagtgtagacttagcctcaccacgctgtgcggccaccatgcgcttcctagggcccttctgcatgtactctgcaatgtcggcctgcatgtccgtcaatgtaaaacccaggaaccgcatacctatgtatgcgaattcccggaagtcacttagcgccgcggccatcatcatcgcgatgtcctcgcgctcctctttgggaatactgcgcggattcgcactataaccagtaagtttctggttgagcatgcgcagtcttcgcgcagtcttcaccgataccattagacaattccttctagtaagtcctcagagtctgaaccaccaactttatttagaatttcttgcttacgcgcctctctacgcgccgctagttcatcatcgaactcgtcacgaaggtcctgcatctcctcggaatctgcatccgcggtgatgtcgttgtccttcaagaacttggcgataaccgatttatctgcggcggggagcggcacctcgtcttccttagactgcttgatttcttcaatcaaggcctcagtgaacatgcggtgcagctccgagaggcgactgcgtttagccgcccctgccattgtgcctccagtaattatttaagttttgataatcccagcacttctcagctccgctaacagggcgtttagctgggtggcaacgttgctggtgtcggtactatccgccacggcgtttgccgggcccttgtacgccagttcgcctactgaggccagccagttgtcaaaagctgcctgggttacatacccatcgcccgcctctacatctgcgcccagcctagccgccacgagcgtaccggccggtagcgtctccgcaaacagcaacgaatttcccactaccacaaagctgtagccggggatttggccctgcccattcagctcaactatggccttactaaaagcgatgggcggcgtcacggtgtctgtgggggtatccagtactgtaaaccaagggtagcttacagtgaccctgtcggatataaaggtctgctctagattagttactcgggtatccaggatagcgtcggcagactttctagcagcctcttccgcatccaccctttggtccagacgggcgtcgccggaatcgacgtaacccttgttagtggcgtccgcagtgtccactgggtctcctaggtgggtgattcgatatccgtgcatactgatatcgccgtagaagccctcaatagaacgcccctcaactagctcttgagccaggtgcaggaactgcgtattctgggtatctacgttgccttcaataaacggagcaccgctagagaattcaatgtaaagatactctcgttcagtcttacgaattaggagcaccactgtctctgcagacagtggcgagttcagacgaatattggtggagctggtccaagtgaaggcagtagtctcagcaccatctaagtaaacgtgaatataggacttatccaggtactcgatatcgcactggatatcctgagtacctgcaggctttaccgactcttgccagctgaacgccatattaatcgtctccgaagttattgatgatagctcgcgtaggtgcgaattcctggattagcggtacctgcttagtgaaggtcttgatatccatattaccggtagccaggtcctgtacggccccgagcagccctgtgacgtaacccatagatgccaacgagtgacgaggagaatctcccaggaaaatatcctgcagtaaggataccccgccgatggcactcatacccgttacggattcactgatgagtttctgggtgtctacatcctttccgtccatgccatgcttggccatagtagccagcagcatcaacgggaactggtacgccataatgtgggccacaccaatccacccagcatcgttcagctctctacgcagaatcttgttagtggcagccagtgcgaagctctggtaccctacaatgactttgccgataggattgaactgcgcaaagtgcgaggtctcgccggtacgaatctgctgtaccaggtagtccatcatacgcgtccctacaacctcaacttgcatctgcaggtccggctggaacatggcgcccgggttagccttgttggcagcgatagcgcggtccgcaacgtcacgggtaagcccgaaacgctccagacgcttaaacgcctcagcatcgcccttgaacatctgcgtaagctcatccgccacaatgccggagttcaggttaacctgcagccggtgcaccatactcattccgttgacgtgacgtgcagcctgcccaacgttctgagtgacgttgaaccaggaggcctgacgggtcaggtccaggttatcgtcggcgtacgtattcaaccagcggaagcgcatctccttctggatattaccacgcagcacagtgtctagacgggcagccatatccggagtcttgatagctacggcaccttccttgaaccaaggctggtcacgcatactgcgcagcactctagccataccgaactccttcatggccaaagcagtatcagtcagctgatataggccggagttcttaagcatggtggcgttagccatgttcccggctgcacgcagcaaatccggaagctgtccagcgtcagcaggtgccccacccaggataaagtcgatggtgtcattgacggtcttctcccacttagcggaatccgctagcgcgtgcttagactcatcaatcatcttaacgagctgtcccaggtcctgtacgcctgcataggccatgcctacacgcccagacatacggttagtgtacccgtgcataaccttggctacatcagtatccatcaggtcctgcatgcgcatgctcttaccgttcaccagatactctttgtccatgttgaaccgagtacgctgacgcagattccgcgcaggggatgtgctaccggattcgcgtacgttaccagccaggaaactctggattgcagactcatctacaccagcgctacgcatagccataacgacctcgtcgttacccataccgttaatcagctgcttccacatagggccagactgcccggcgcggccattatagataccgtcaaccatctccttggcaacacgctgcactacctctgactccatgctcgggtacacgtcccgcagggcggaccggaacagggcgcggtagtcgtccagagtgttaccctgtgcgataccttgacgcatcttgtcatagctgtactgacgcgggaagtagtagtcggatttaaccaacgcaccatcatccactagacctgcattgagcatatgctcgtgccacttgctagcccagccagagcggcgataggcgtcaaccagtggagcaatctctgcatccggcaccggcacagcgcggccatttacatcagcactgtaggcagcatccaggtacttgctcaggcggtcttccagtgcagcccgctcagcgcggaacttgctccgatggaagaagcgctcagagaaacctacacccttatccttcaacgcacccaggatagcgtcttccactacgctggcgctggcgtccatctccaaagtaaggttgcgtttgaagtccactacggacgggcgacgaccccctacggcggacgcatccgacactagcagcttagccaagtcttcgttgccttgggcgatgttatcgtacagggcaaacatagtggagagcttcttcttagcgccgtccagcatagcttgggcacccttagcctcgttgagggtagtgctgcccgccaggtcctggaaggcttcgctacggaagctctgggcttggtctgcgtagtccttagctgtccacttaacggcgtcctcatacgcatccaggacgtcctccaaggcagagcctttggccttgatgcccagggcgttcatgatgtactcacccagttggcggagcatgctcttaccagttggggatttcgtccgcgccagatgctcaacccactcagggctgtcgcctaagcctgccagcatctcgtgcacattgcttgcgtaataccgcatacgcggcgtcaaggtggagtctgctgcaataacagcgcgcacttcctccaggcgcttagcaatctcgggattactgtcaacggcgcgtgcagtggcggcatgaatcagttcgtgcacggctaccttgctggtgtctgcatccatagcgcgcagtgcgtccccggctgtagtccaggtgctgccattagctcgcttaggtgcgcgtagagatacctccccgcgcctagctaaatcttgttgtgcgtaagtgtagcggctgcggtttgcggagcctgctaccagtttaaaatcaatgtcgtttacagcatcacccagcgtgtccagaatagccttctggcctgctgtcaagtgttcagacttcttcaagaactgaactacgtgctgtgctttcatgttcacggaggcggtattgtttctcgatactaggatgctttcatccagtgtcttagtgagaatttcctctccctctcctactccggtaacattagcatccctcgctgtacgagttgtaggcgcttctgggtcgaacataggctcacgcccagtacgagccttagcggcagctttagcagccctagacatatcccagagctggtctaacccagctacgcccgctatcagtgcagttaccgcggcggactggcccagttggtcctgtgcatagaatgcagtacctacatcagcagcgcgtatggcggtacgtgcagctaagcccgcgcggccagcaataccggcggcaggcatcggggccagtatgaacggggagtcgcctaccaacatacccgcgaacccagccactgtgttgtcagccattaagcggtcacggtcacgctgctcaagcatctgctgcatgcggtagttataatcttcgaccgacaccgagtcgtgcaagtactcaatctcttcctgatttggggcgtacagcttagctcgggtgtcgctactcagggtctgcttggcattaaagttcaggtctcggtcaaatgccggagcagaggccttacgtatagccgcagcgatgatgctgttacccatacccgatgcaaagctctctgcggctgtagtagctggggtcttggcctgcgccagtaaggaggcacgctccagcgcgttcaggccgttatctccagcatcattccaatctacgcgctcaggcgcaggtttaattgttgcgcccttagcagaatccttttcctgtggattcggttctcggttcagaaactgagccataatatctcctaaaagaattttgataaggggaggccccgaagggcctctggttagtgcgttgcttcaaagagccaatcacgtaggttttgttccaggtacttcttacgctcaggttgggcctgcttgtacgcagcggtattccgcagcgcttgccaagccctacccttggcctcagatacagggtactgatacgcccccaccggggacttagcagccttgcgcacctgtgccatcgcctctgctacggggccagagctaccgttaccgccgtgatagttcaggtccaccatgacctttaacgcctcgtcggaggcagtcaaaccctgtcccttgagttgcttctgcacgttcggtatgtactgcttctccagtgaggatttgaggatactgacaccgtcgtcaatggtcactttctgtgggacgggcatgcccgagttaacgtgcagaccgaaacctacactacccttgcctttgccttcccggaacccttcgaacttcatagtggtagcgagaatgtcgctaaacagcgacggctccagccctaccgagttacggccgttgacctgtacgctgacagcacgcccgttgtcgtggtcgtagaaggtggcgggacgcactcctacttgctcactgccaatcttcatatctccagccagtgccgaatcgtacgcagcctgcgcagtcgtctgaacgtctcgaaggttcacagacatcgtctggaaggtgcccttcttgtcgaacacggttacggtcatgttctgacctgcgttgcccgcagtggcggcctgcacgactacacgctctatgttgctgtggtctgacatatactgaacctggttctgtatatgctgctgcagggaggccttgaattgctcttggtcgcccttgtaatcacccatgatagattgcacagaggtgcccgcgggcagatacacatgcctaggtgccccagcaatgtccagctctaacttacgggattggatattgccttttagcatcgtattgatgtcgtcagcgtccttccctacaagggattccgggttgtgattatacatataacggtactcctcttccatagcagcgcgagcttcctggcgctgggcatctgcatccccgaagaagctaaaccagttggccgtgccacttgggtccaccatcttgtccgtggggttactctggatattgctgtagcgcccactggccttattgcgtgcctggcggcgaaggtcgtccaagatagtgttactggcattatttgggttttgtgtaacagctttctgcaccactccacgccactcagatgggacctcagacagcagcgccatcttccctaagtccgtactggtgctataagcctgtgcccataagttgatgctatttacgttctcgcgggaaacctcaccatcctcaccgagctggtccagcgtagtcagcgtacgtgccatatccgaagacatacgcttgtgcgcttcgttgactgcccacgcatccttgctgttgctcccgtatgccagcagctgcaggttcccttccggggtgtccggaaagcttttgagcagctcgttgcgcgccttacccaggtcgcccttgtacatccccgccagggtggagcttggcatgtttccagtaattgctgtgcgcaatgcctgggtgtccgctgccttctcgcgaatggtctgggccttgttccagaactccatgctggccccagcgctgagcaccccattggttgactgctcaatgattcgaccacggatacgctgcatagtctgctcttgctgctcaggagtctgcccttcaagagactggattgcatcggagatttcgaaacgggcttgggtctcaatctgagcacctgcgcgcttgaactcctgatacagtgccgcgttgacgtccactgagttaaccccgagttccttggtagctaacccttgcagctggtttattaccatcgggtcctgcgtctgctgcgccacgctgaccagatactgcttggcccggtccagcttcttgctcttatccaagtgctcagcagccagtatgctatctaaaccggtcttgatagacatctgcgcagcggcaccctgtcccgcctgcaggcgctgatagaactcatcactggacgagctaaggccgcggtcgagtgcacggtcagcctgcgccagggcaaacgcagctctacctttctggaaggctgtgtagttcgccatgctggtagcacggagctgctgcagtatattcgtggcagactgtttggacatgtccgggagatacatcccgagcttgtctgccattgactgtacgtgctcttgctcctgctgctggaattcctcgtcagtcagaccagactcagcagctttcttagctcgtgcgatgctatctgtgcgccacttggctagagagtcgtacgcggcggcggatacgtagccatcctgataggcctcacgtacgaagatgttctgcttctgtacagcctcatctttggaagccattgcatctactgcgccctgggcatccattgcgccgcgcaccgttgcggctgcagcgttttcttttactgcttcgtcaaaccctacgccgaagtcctgcacgaaccctgacagggcagctaggcgttttgctttggaggtatcaacagacacctcacttaccgttgacggtaagctaacatcgttggactgcagttgcactcctccgatacttaacccctgtctactgggttgaatcacaggcatttgacattcctcttaagttaccaggtatgaactgagctgttacctttgctcccccataaatcataggaggacgccatgttctgagtagctgctgcaccacttccgggtgttgagctaccagagtcagtagacgacgcagcgttaccagcgtactgcccaacggcagatgccccgacactcaacaacgagttaaacatgttatcgtaggggtcctccatgtccatgttagccaggccgctgtccacggccttgtccgtcattagacggaaaccctcttcctgagttgcctgctggtcacgcacgctggcctcttgtcgtccggctacagtgttcactgtggctacggcgtctttaacagaggcccccatagtaccggaagctgctgcctgcagccctacttggctctgtgcctgcagcttctgctgctggatgttaaacagagatacctcagtccggtccctggactgggctcgctgtagcgcgatgtcgtttagctgtttggctgtctgttgaatcacagccttgttcctggccttggacacttcaatctgagcaccatgccccagaacggtcttagcggccatggccgcaaccatccaccacatattaaattctccgtctgcgttggttgtagcgcaggatgtacgagatatccagcacattcagttccatagaaccctcagtaaataatgacacctcggttgtgtctgcgttagtacggcatggcacggtaatcgtagccaggtccatacgcaggacctgcccgagcgtcagctcttttgagttcatcaggatacctgtcagttccccgccccagttgacatcccgtggggtgtctagtacctgcacatagaagtgcccagagttacgtaccgccacatccaggcgcagcaggcgcacgtgcccactccccacgagcttgtcattctggtcccgcagaataggtgtagttagcgtgaacgtactgcggtaacgcctcccgattacgtaggtgccatcaggtacaccgcgtacaacccgcagggtgttctccccggcaatctcctttatgccaacctcagtaggtcccatagggttactgggcaagtaagttaggataagctcttcctcatagcggtcagcccacccaactggacgcagtactgccggaacggtgaatatcccgtcctgtacttgaacttgcttctgcaaatccgagtacgcttcgcgatactccgaacccagctggtaaccttcacgcgggtccatagacacaatcaaaagcttgttgctgggactgggcccttgcatgtacaagaacacttcatcctccagcgcttgtacgctcaggattggatacgggaacgaccacttatgccacgccgcctgcatcttagcgccgtcacttccgccccacatgaactcgtagaccagcaagctactacgctccccagacatgcgcgagaaggccatattggtgacactggagttttgcatctgcaataccctgcctgggatataccgcggtaagtgcaccgtagaatcctgtgtagtatactgcgatgaagtatacggcgatgggatcaactcaagaatacccgcgtagctgtcgttgcgcttgttcgggtaaattactgtctgccctgccatgaccggagtaacgcgactatcgcactcataggtgctggtaatgctaatacttgcgttagtgggggtgagcactgctgaacccggcacaacggcctgcatgctgttagcaaacaggaccaggtccctgttaaactgtacagcggtacggtacacagaatcctgcgcagacgcagagctaatactgatacggtccgtatccagcagtgacgtcacagtagagcggtagaagcgctgatacaggcccgaggcggacatatccacagagctgccgctaagcagaaccaggcgaccctggaaagctgcaatgccagtaatgtagccattctcgacgaaccccggattaccgttgttatcgtcgttgcctgctaagcgcccttcccaatcccgcgcaataatattgtcatccgcggcaagttctctgggcatgttcgtaatcttggtgatgctgccgtacgcccccacctcagaccaggtgcgggtgctgtagctgaactgataccacgctgtctcagacgaggctgtacctacacggcacattgctccgtcagcttgcgctgggagctgtgcaggcaggtcctgctcctgatctacacgggactggttggataccccagcgtaagtatcaccggcgtcagaggacaccacgcagttgctcagtccatagaagaacaggtacgcaccgcgtacgctcacgttcccggcgggcatgccattagctacaagagagtcccgcagctgctgagcaacgtaggcacctgatacctcctcagcgttaccgctggtgctgccagcagctggggcggtgtagtcccctgagtagtctacccctgcggaggtaactgtgacgttccagcgtttctggaatgctgcagacttaacgtagaagaaccccgtggtgctggggtcgatacgcccagtattgtccacggttgtgctaggagccatctccgtattcaggatataagtcagtccggcaatgcttgcggtctgcaaagaggtctggcctacggtggtaacgaagtacgggtcgttgccggaattaaggatggtctttccattcttagccagcaaccaccagttaccgttgctggtgttaatcagcaggtgcctaccgtcagtgccacgctcgacgtattcagtgaacagggagtcaagcccagggttatcgattgtgctttcccatacaatctcacccggcggtctacggcggataccggaaaccgggtcgctgagcatattcagctgcgcccccagttgtcctggttggcgctctctcggaacctgctgggaaacgccctgcagcaagctctgaatagtaccttctaatgattgcgccataacctctccttagaccataaaacgagcgcggcggattctgcgtgcaaaacgggtcttgctggtgctgaacttctgattgcgcagatgctcgcgcagcaccatgctcttgtaccgctcagcttcctgtgcgtaattagcgtagttgctgtcaccgcccaggtcatttaagtatacctgcgcagtggtgtagttagccacccacatagcggcgtgctccggcaggtcctcaaaggccaaatccagtaccacacgaatacgcacaggcgcatcgaagtattggttctgctctaccaggtcgtataggttcccgtcacgtaccccgtacttggattctgagcaggcgtcatatacagccagctggttccacggcaccttaatcaggccgtcggtggtgggcgtaacttcacgctcgaccacgttaaaccagaatcctgtgctgagcaacccacgacggttacgtgcaagtgcagagcgagctaatccagcgctagggttactagtgttgatgtccataacgcgggactcccccagggcttccagcgtcaggttcacagcgtctaattcacgaataaaccacccccggcacgaaaccgtgctcttcaagtttggcgcgcaagtacgctgcacgagcatctagtgcagtatcaaagctgccaattgttctattcttaccgtggttgcatatctgcgccacgaatttaccctgctgcttggcaaagtagaatcctctggccttagttaagttgcacagattctgccgtacagtagccgcgcgcaagttctctatccggttatctttgcggtttccgtttatgtggtccacggtgtctggccactccccatgtactagaaagtacaccaccctgtgacttagatacttcttaccgcggataactatctgatagtaccccgtgggtcctgagtgagtgcatccggctgcgtcaccggccctgtacgtgtttctgtacccatcaaccctccagcgtaatccgcttgggctagtagggtcgtacattagtaattctctcatatttgttcctctattaaagaccccttggacctttaagacagggacaaaaaaaaaaagcccctggcacccgaaggcaccaggggcgcgtattactcttccacagtatcagcggctgcatcagccgccttacgggttttcttggtagccttgcggccagactcgaccgaggccacctggatgttcttcgctacatcggtggcggccttaaccgcctcccgctgagctgcattggcctggagagtctccagaccgaacgtagcgattactgccattgaacctccaattaggacttggtggtgaaggtgaacttagtcactgcagcggtgtccggacgacgcaggcctatgttgtacatcgcgtagcagtccagtacgttgctgaactcgcgcgtatcgtcccagatacgggaggtgaacggcttagcttcaacagtcaccagggtcttggacttgctgaaagtcaccatacggcacagcgcgtcgtctgcggtgacagtgtaagcagagcccagcggatgcgtaccagcctcggtcgggaactcggtgcactctactacaggtacgccgttcatcttcactacacgacggtctttgtaaccgtcgttgttggacggaccgaattcgatgttcaggagcttcggatgctccagcagacgcgaataggtatcgacatccaccagagtgaccatatccgccagcggggtcttgcgcttgatgagctcatcaataccagccttgtgcgccaggttgatgttcatggcgttagcctccatctcagcctgggtcagctgcgtggcggtagtggtacccggaaccaggatagctgcgcctacctctataccgtcgttgaacgccggtttcaggtgcgccggagcaacccaggaacggcccttgatgagctgaatcaggtgcgcctggtcgaaggtctctgcgaactcagagccgttgttctggcccatctcggttaggaagtccggaccggtccagtcatcctggtagtcaatcgggttacggatatacagcaccgtatccaccacgataatcatcttatcgttacgaaccggggtgctatccagcgcctcgccggagcgacgacccttcaccgaggaggtgttcaagcggtcaatacggtaggtgttagaaccgctgatagagcgctggctggagagtcccaggaatagagcctggtactggaagcgggtatccacttcgttctgatacacttccaggtgaatgtctacgtcagacgccgcgccgccccagtgcggacgagtcaggttgccattataaatagtgttagccatgccttagtttcctttataaataaaattaaagacctacgcgcttaccagcctcacggcgtgcgagcaaatcattataacgttgactgaactgcggagatgccaagctacggttgcccgcttcctgacggagtttggtatattctgcacggaagtccgcagcagataatgcgttgttgctggctacgccccgtaccattgggttctgtgtcttgataagacccatatcccggcagaagcccgctaccaactcagcggcctgcttaagctcaccagcgttagcgagtacacgagctgcgttacgcagaggttcaggagccttggaattaaacagctgtgctgctacctcccagttctccttcccgcccacaatatcgtaagcttcctgcactgccttggtggcttgtccaacctggtcttccaggtacgccttagccaacagctctgcgtaagcagcgtgctcgccgaaacgttccttaatgaaggccgtatcgattaggttagggtcctgatactccagggccttaccaagtgcccgcaccatatcagagtcagttaacccagatacttgcttcaacatagctaccccggcgtcaatcgtcggattgcctgtctgagccagctcctggggctgctccttagcgctatcgccacccttatccagggctgcttttagggcttcgatatccagaggaatcttagcaggttcaggggaatctttgccctgttgctgctgggtaggtgcgggcgcatcctgcacgccttgattgttcggggcgttaaggggagcacctaggcccggaatcttagggccgccttggttctctacctgtgtagtttctacgttctgaccgttttctacgttatccatctatgcccctgttgttaacttggtaataagcccagctgcttacctgctactgttgggtctgctgctgtcaagccctggagttggtcctgtgctgcacctgcggatacatcggcagacgcatcttgaacttcttgcttctgttgcagctgctcttctgtgtacatgaacggctcgctgacgataccgtaggcgtcgaagtaccagtctacgcacgcatccttgttgaagcgtggagtaatctgctccagcaccgggatagccagttgcatggactgcgctgcctctagcagcttatccgctgctgcggctttagccagtgcagaggtacccaccgtaacgttgatgctcactacaccttcgctgaggtacagcttaaagcgaggatataccagtgcagtgtacaggtacgccagcttacgcagccatgtgtcgctcagaatactgaacccgccacccatagcggcttccgcctctttggcattctggcgaatctcgtaagccgtgacgcgctcaccttgccgggagttaccggtgtacataaacgcacgcgacagtttctgttcgagcatctgaatgttgctggcaatccactgaatcttctgggcagagccaccctcgtaagcagtgacgggggatttgctgttcccgttggaaccgccgccgcccacctgcacagcctcgccagtctccgacgttgcgaactcgtccacgtctaacccagagcttgcgtcaatcagcgggattaacctcgcagactcaacctcgtagttagtcaacgcttccgacagtaccgataatctggcgaagtccccggcgtagtcctctaccaagccgcgcccgtagtgttcgccgctaacaaggttccacaccagcacgttgtagggaagctccagctccggataggtgctgctgtctccaatgcggtgcccgtctgcttcttggtacacctcgtagcttactacctctgcaccgtcctctgtccgcttaactttgcgacaagcggcagtgtagatatcaacgtcgccgtatgggtctttgtcacggtagaaggtgttccggaaactctctggcaggtcctggacgcttgcgcgctctctgataatgagtcgcaggacgttaccgcttccatcccttcgaacggtaaagttacggactgaatagacgatggatttacctgtccgctcatcaatatactccaacgcgttacctgtaaccagcagcagcttcacagcctgcaacttcgcagcataaccgtctttctcaaatactttctgtgacgccgtgttctcgacctcggccaacttagattctgccgtagcagcactgcccagcgaactaatgaactcgtccaggtccgaactcttggagaaccggaagaagctagtgccttgcgggaacagcgcgcctacaatcttagtggctgcagtgttgaccagctgcgcccctgtgctctggtaatcacgctccaggggcctgcgtctaccgtccagggaatcgtcccgggtaaagatagtgctgagcgtccactgcgcaaacttctcagaggcatccaagacacccgcgtcctggtccttcttaaagagttctgctaatgttgctttttgttccaagctacccccttacaggcccagaggattgctctgccctgcttgtcgccgtttcttctgctcagacgtaattgcctctgcagatgcagaggcagcccctgctgggtcaatctcagcaatgttatctgcggcgctattagcctctaaggcagcctgttgtttagctgcgctggcctgctgctctgccaagcgctgctgtgcctctaatcctgcgttgtcagtaaggccgagcatatccgtggccttacctaacagtttacctaaaccaccactcattctgacctcactaaatgataagttgtcttgtacgtgttatccgatgtgctccggctaatggcaatacgcccggcgcgcatgcacttggctatcgcgtgcatcccctgcataatcacagtcactgccgcaccattttccggttttagtacgaagaagtctgtatacagcacaggctctacgtaatgacagtcctccacagcttctggatagtagctgacagcaccgactaatccgccttgggagtcatagactcctagtatatactgtttacccaatatacttcccagcactctccagtagtgctgctctggagccaggccccgactaatgccgtggcccagttcgtgcagttgcttcactgcgtctgtaatgtcgtcagacttatacagaaccttgagagtgtaatcggaagttttactagtgtgttttaacttcattcctactccggtaacttcatttatcagcagaagtattcggcctttgctttgcggtatgcggcctcagcctcgggtattgtaccgaaggtgcctagatggatactggcacctctttgggtcatccttgcggcgtacttgttcccctgcttccgtacgcccatgggtagcttgcgacctcttgtaggggtcctgttgccttggtttagacgcatactggatgcgcgtaaattggtccaagcattgtttagaggattcctgtccgcgtggtctatcacatccggtggctcttccccagtgaccaggacccacgcaaccctgtgcgccagggtgggctgtccggccacgtacaccattaaataaccattactgtacacacttccggcggggctgcccgcctttgcgccgcgctggtttatgcgccaacatagtgcgcccgtctctgggttgtacgtatagcgacgttgtatttcctctaaatgcggcagtagttgtttaggcataatatcctcatgaaaagaagaaaggcgattccagcacttgccggatgtccagggaacctacttctggcatatccaaatccgtcaagtccgccccagctgctgctgccgcgcgagtaatatccccaagtaggtcatgctcttcgtataggctcacaaactgttcgcggatgtgtcggtgcatagcgtcaacgtcagctgcatgtgtagccagcgagtcgtgaataggcacgatgtccaacccttccgcggcacacagaaccatcatcaagtgcgtactgtccaggctatgcacaaagttcggggcaatcccagaggctgccttgcgcttgttacaggtcttgaaatcccggttatgcacccgcatgacggtgaggttcatgcagtcaatgcgtacccgcacttcttcacgctgcgtgtaacggttcattacaagcccacccagcggcgtataccactgcagatgctggcttgccggtacgcgtctagcgaggttctgcaagtaccccataactgccgcagcagctgggttcgcctcttcgatagcggtacgcatacgcggcgccaggtagcacgacaggttccacaggctgttagtctcggcaccctcgtatccctcggcgcaagcaccttcgaagatgtagtcgctgcagctgcgcaccgtagcgctgtagaaataggtcatactggggcgcttggtcatactgcgggtgatttcgttctctctccagtacgtgctctggataacgaaatcctccttgtccaggtccagtatcaccttctcgtccgtacggcgcttcacgtccatgtacaggtcagctttcttatagttaccctcccagtacaggttcgtcagacgcccgcccacagggtctctcaggagcgctgagagatgctgcccacctgagtttgtagcgtccatagcaactgggattcggctaatatgctcttctgggcatccagaacgcacagcattaaccaggtcgatagcggcggccaataggcaccaagggctgtccgcggaggtgaaagcagggcaatcaaacggtgaaactgtaagctgctcaatctctgcaaagttcgcatcaacccaagctgcgcggtcttcgaataaggtcttgtcataaccaaagcatgtggcgacatgcaccttgagccagaataagccgcgatcacccagaggttttcctctgccaaactcaagaagggctttctgcaaatcagaaccttgagggtgcagcgaggacttgaagtacaaccggtaccgccaatccacgcaggttgggaagtacagagctttctcatctttgaattcctctgccatttctaacgtagtcaaaaggctgcgcagttgcgacacacgcttacggtctgcgctgtaccacagggacatgcgcgtcttccactcaccaaaacggtcaagctcttcctctgtgtagttctcttttggaacaccatccaagtaccactccggtttcggctccggtactgagcgcggcatgcctatcccaacacccatggcccgtgcttcttgcaccagttccagtatgcgcttattaatacggtacggggtttcctgtgccttattaagcgcttttttaatgccatccgcggacttaaatgcttccgctacttcacggagacgagctctgtcaatgtgcgagttatgataggtcccgcgattgtcgataggggtgaggtatccaccatcccacagagtagtgtgctgcaccggcggtaccagcataggcggcttcatggttacagtgtcagcggactctaccagtttctggaaggcctccataacgtcgtcagccggatagagcatgctcagattcccgctacagttcttccactggaacaggcccgtctcaaacaccgcggcacacagcagacgccctacggagatgttctgggcattggtccaaggctcgtgcccatagtgcacgttctcggcactggcgcggagcgtacgcaggatgtgcgtaggggacttcgtacggcgctctgtgaggtactcatacacacggtccatgtacgcaggggctacgttgcgtaactgcagagccagtagctctgactgtacgtttctgcccagtgcggacattaccgcctgtgcagtctgacggcgactggcggactcgccaggggcgacgctgaacgcctcaaacattgtgcacaggctcagagtggtcaggacgtccaaggggactaagcgcaggaaccgtcggtacttaccaccaatgcccggggctttgacatttcgcatctcatcgatagcggcagcagccacctcatatgccgaggtgagcatacgctgcgtcatcggcaggttcataatcccgccattctgcagtgcgtccgtaatcagcttacgtgcccgctcgattccgcgaatcttataggtctcttcaagctccagctggcgcttcaccagtgcttcctcgggtactacaaccgtattcagggcgctaatcataggcgcttagtctccttggttatgtccggtacttctaactactgattgcgactcacccagagattgtacatctccagatagtctttagcggagctttcgtcgccccgttctactgctttctgccacatcccgtggcaccatgcgctaggcgtcaatgcacttacctcggtgttgctcgtacagttctgagtacttgtcggacttggcaatgtcctgctccagcttatccttgttcccggcgcgcagtctgtacttgagccggttccccaggcagtatccgtagaactgctctttcgtcatactgcgtgcaatcacctcaattgcctccaggtccgggaagaactggtagtgccgaggagagttcactgagtcagaaacagcctcgctcttcgaatggaagagctggaagaactccgctcgccaagaggtcccacactcggctaaggttataagtccgtcttctgcgcacgtcactaatctgggggagtctaggtctacctgtagctgttcacagatgtccttccagataccccctacgtgactcgctttgcgcacaaccaaatcacctgcatagaatttagtggattcaatcatttaatagtctcccgtgctttgcgtcgtgcccgggccttgcgggccttgagcttctgtgcttgtgctagttcttccggcgtcttgtgcgtatagtatagcatatccgtaggttctcggtctaagtaatcggcgaccctacgtagagattcagcaatagccccagaagattgcatgctaccaacaatccagcgcccagcggcagatgccactttgccttcccctccattgcacgagcgatgaagagcaccccgaatacgcccagtaatatgacagtggtcaacgacaacagaatcaccagttacccccttgattgtgaagtccaaaggtttgccgcagaggaggcatatacctccctggtctttggcaagcttaatagccacagagcgaatctgtgctcgagttattttacgcagcgccatgaaatccctcttaacatatgatataccgtactttgagccatacccaggcgtctagctatagcgttgctaccccattcccggtccccaggaatgtgcatttgccgcagatagcgcaccgtaccttcgttcaaacgtgagcggccgctgctggaaccctttgctgatttgcttttgtgggtccctccatgcaggtgctcagggttaatgcagcgagaatttccacaggtgtgctgtactacttcgggccactctcctgtgtgttcatagtacgccttcctgtgtgcggttgtaggttggcgtttaccgtcaataagcacccacgcggataggaacccagtctttggccgcccctttctcccatggtctatacaaggtgtactcattaccatacctcaatccccccaactacatccagcatagcattgtcgtgaatgagagaatccaaatgctcaaccgttcttcgatgtgttttgggtgctcgttcacgcagcgcatccagaatagtttcaagttcatcgtgtttcccctcgtagtataactcaatcgcccgcaggctcatttccttcgcagacatcttcgccattgtctgggtgctcctgtatccactgtatatgctgtttatggtactcgtgcagcgaatgcacccagtcacgcagactgggagtagtcaacagtgacatcagatactgataggcagaatctgacggggagcgccgcaggaacaggcattctgcctctgcgagtacgtcttggttgtttcgagcgtaagccgctacgacgaattctgcggcgtcctgctctgaggtaatagggtagatagcatcaaaggccgttcgcttgccacagggcttcccatcaagcaacgtgatgcctttgacgttatctgcgtcgtcccctgctagcatctgccaccagaagaacttcaacccgtgtgctcgtacaggcatagcctgggtgtcatcccacttaatccatccgaatgggtcctccagtgcaggccacactgtacctgtcggtatatcgaaccgagccatagggctgagccaagaatccttgtcctgggacatcaggattccccggtctccgaagctgtacgaatccattacaaagaggtcgtcggcctcgaagtagtcactgctgactacctgaataccctgctcagaatactggtctgggttctcaatcaggtgccgcttcaacggtgccttgagcggtagctcctgtcgattagcgcgctgcccctgatagggcttagccgtaggcaggtgccagcgcaagcacttagcacatcctgcaggcgtcaggtacgccactgcctctgagcagccgaccaggaacatgtcctcaagcaccagctgatagaagcggcgtattgcggtatccaaacgttttactgtagcggcggctttgtacacgcaaaaatccgcatcgtacagcagaatcttcccagagttctgcggagctaactgctcgctaagctgggacaagtcaaccccgttgataatcatcagcgccccgtaatatcgcgggccttcttgtcggcccagttaacccaacgttctgcccactttgccttgctcagcttatcgccaaggtagcacagtcccgccaatggaatcagcgggagaatcaaagctacgtaaattgcgcgagatacgtacaacatacttaagcctccagttcagacagcaccagcacggtgccgagcatgtccccgattacttccggagtacgcaggctctggtctacgtcgtagatacaggagccaatctccgccaggccaacgctgagcgtgcccactacgcggataagtacaaggtcgtctcctcgtaacttatcggcatgtgccgccagatcgttgtgctcccggaaggctgtagcggccaggtccaggtccattccgtacagggccgccagctcatctagtgcgttgtagatgtcgtccagactaatattaagcaccccatacgccgctgcatcgtataccgctgagccgaccgtaatggcaaggttctcgtacgcttctaatactttatccattagtcaaatcctttcagtttgtgtttttgaatgaaggcgtaggctttggtctcagtggccgtggcctctgcgcccagggcgtatgcacggcgccgggacttggcgcactggcgattcaagtgataacgctgcgcactaatctcgggacccagaaggcttgccctgtatgcgtgagagctagctgcccagcgccagtcgtctgctcgcttctgcaaacgctgtgcgcgcagaagcagaaacacagcgtactgttctttggcccatgtgattatgcgcatttatacccccaggaagttagctacttcgtcacgcttggcacgcaggttatcagcatgacaagcatgcgcttctgctacctctttgctgtgcttggaggcctctactcgcgcctcggattgagcggccagacgtactgcgtcgtctgcgaatttaactgacagctgctcgttaaactgcgctttggcatctgctcgtttagcttctgctgtgtaggctgcactcaggagtttgatgagaatgttgatgatgttcatagtcttcctctaaggccccatgcggggccatattagtttaggttagggtagattaggcttgaggtgcagcaggcgcagcgggcgctacaggagccgcaggagccactggagcagctggggctgcaggtgcttgcggtgcagcgggagccgccggtgcagaaggagcagcaggtgcctgcatagctgccggactcggaacagagccagcgttcagcataatatccagagcactgcccgggaagtctacggccttgtacatatcctcctgaatccagttcttgctcttaccgtcgtcgaaggtgccttcgatgtgtaggctgtcccaggtctctttggttgggttgttccacaggaacagcttaatctcagaggcatccagggctggcatcttgataggctcgccggtgttcgggtcgaacttcggaatcgggcggataccggacaggtccacgatgttagacttcttgcccgcagcactggtgtgctcatcaatcgggaaggtgaaggcctgccccagacgctgtgctgcatgcttaatgctattgtcgtagttgagcttgtcgaagaacttcttgaagcctgctcgctcaaagttactgatagccatcgggtacgggcggatacgcttcacttcaccgttaggaccgtacaccacaataccgatgcgcacgttagccactgcaggcttaccagtaggcttaccgcccttagttggtaggcgcttaccgatttctacgtactcggtgaagtagccgtagtattcgcccttcggaagcagtacatcctcatacgcaccgccctgtgaggtttcccgcatatctacatcttgggtttcgattgctgcgtctaccagagcgttcaaggatgccagtacattagtagtcatataatttatacctcgttagaaaagtgtttgtgatgctgagagataactgcttgccttgctaagtgggcctcttctgcggtagcgtagaatcctaggtggtattgtaccccatctgtttgtatgtaggcacgccacttaccattgcttttacgataagacactccacgataccccgaccgggaatccttccgcaatcctgcattcttcgcgtttcctgctttattggcctcccttaaattgacccaccgattatctgtacggtttctgtttacgtggtctataacgttcggccaacgtccgcacattaaggcgaaggccagtcgatgtgcaaagtattgcctacccttcacacttactaccctgtaaccatccttaatgtaacccacagcctcggaaccgtcaggcctatgcaatttccccgattcggggtcataccgcaaatattgcggcagagaagtagcgtgcatataccctctcgtttagttcaaatgatatttacgtgcagatgcaggacaggcctagcgattcttaagtgcggacttaatgcctgcagccgcggctgccgccacaccgcctgccgccaggattgccaacagcaaagctacaccgccgtagaacggaagcagcacccacagccaggaccaggcgataaccccggtcagtttcaaggttataaagataagacccagtacagaacagattcccattttcattggtaccccta

SEQ ID NO: 47 - DNA, 43154 bp, Unknown
  source: /note="Description of Unknown: KP2M-P0207 Bacteriophage sequence"
gccgctgcgcagatgtctatcaagaccggtttagatagcatactggctgctgagcacttggataagagcaagaagctggaccgggccaagcagtatctggtcagcgtggcgcagcagacgcaggacccgatggtaataaaccagctgcaagagttagctaccaaggaactcggggttaactcagtggacgtcaacgcggcactgtatcaggagttcaagcgcgcaggtgctcagattgagacccaagcccgtttcgaaatctccgatgcaatccagtctcttgaagggcagactcctgagcagcaagagcagactatgcagcgtatccgtggtcgaatcattgagcagtcaaccaatggggtgctcagcgctggggccagcatggagttctggaacaaggcccagaccattcgcgagaaggcagcggacacccaggcattgcgcacagcaattactggaaacatgccaagctccaccctggcggggatgtacaagggcgacctgggtaaggcgcgcaacgagctgctcaaaagctttccggacaccccggaagggaacctgcagctgctggcatacgggagcaacagcaaggatgcgtgggcagtcaacgaagcgcacaagcgtatgtcttcggatatggcacgtacgctgactacgctggaccagctcggtgaggatggtgaggtttcccgcgagaacgtaaatagcatcaacttatgggcacaggcttatagcaccagtacggacttagggaagatggcgctgctgtctgaggtcccatctgagtggcgtggagtggtgcagaaagctgttacacaaaacccaaataatgccagtaacactatcttggacgaccttcgccgccaggcacgcaataaggccagtgggcgctacagcaatatccagagtaaccccacggacaagatggtggacccaagtggcacggccaactggtttagcttcttcggggatgcagatgcccagcgccaggaagctcgcgctgctatggaagaggcgtaccgttatatgtataatcacaacccggaatcccttgtagggaaggacgctgacgacatcaatacgatgctaaaaggcaatatccaatcccgtaagttagagctggacattgctggggcacctaggcatgtgtatctgcccgcgggcacctctgtgcaatctatcatgggtgattataagggcgaccaagagcaattcaaggcctccctgcagcagcatatacagaaccaggttcagtatatgtcagaccacagcaacatagagcgtgtagtagtgcaggccgccactgcgggcaacgcaggtcagaacatgaccgtaaccgtgttcgacaagaagggcaccttccagacgatgtctgtgaaccttcgagacgttcagacgactgcgcaggctgcgtacgattcggcactggctggagatatgaagattggcagtgagcaagtaggagtgcgtcccgccaccttctacgaccacgacaacgggcgtgctgtcagcgtacaggtcaacggccgtaactcggtagggctggagccgtcgctgtttagcgacattctcgctaccactatgaagttcgaagggttccgggaaggcaaaggcaagggtagtgtaggtttcggtctgcacgttaactcgggcatgcccgtcccacagaaagtgaccattgacgacggtgtcagtatcctcaaatcctcactggagaagcagtacataccgaacgtgcagaagcaactcaagggacagggtttgactgcctccgacgaggcgttaaaggtcatggtggacctgaactatcacggcggtaacggtagctctggccccgtagcagaggcgatggcacaggtgcgcaaggctgctaagtccccggtgggggcgtatcagtaccctgtatctgaggcccagggtagggcttggcaagcgctgcggaataccgctgcgtacaagcaggcccaacctgagcgtaagaagtacctggaacaaaacctacgtgattggctctttgaagcaacgcactaaccagaggcccttcggggcctccccttatcaaaattcttttaggagatattatggctcagtttctgaaccgagaaccgaatccacaggaaaaggattctgctaagggcgcaacaattaaacctgcgcctgagcgcgtagattggaatgatgctggagataacggcctgaacgcgctggagcgtgcctccttactggcgcaggccaagaccccagctactacagccgcagagagctttgcatcgggtatgggtaacagcatcatcgctgcggctatacgtaaggcctctgctccggcatttgaccgagacctgaactttaatgccaagcagaccctgagtagcgacacccgagctaagctgtacgccccaaatcaggaagagattgagtacctacacgactcggtgtcggtcgaagattataactaccgcatgcagcagatgcttgagcagcgtgaccgtgaccgcttaatggctgacaacacagtggctgggttcgcgggtatgttggtaggcgactccccgttcatactggccccgatgcctgccgccggtattgctggccgcgcgggcttagctgcacgtaccgccatacgcgctgctgatgtaggtactgcattctatgcacaggaccaactgggccagtccgccgcggtaactgcactgatagcgggcgtagctgggttagaccagctctgggatatgtctagggctgctaaagctgccgctaaggctcgtactgggcgtgagcctatgttcgacccagaagcgcctacaactcgtacagcgagggatgctaatgttaccggagtaggagagggagaggaaattctcactaagacactggatgaaagcatcctagtatcgagaaacaataccgcctccgtgaacatgaaagcacagcacgtagttcagttcttgaagaagtctgaacacttgacagcaggccagaaggctattctggacacgctgggtgatgctgtaaacgacattgattttaaactggtagcaggctccgcaaaccgcagccgctacacttacgcacaacaagatttagctaggcgcggggaggtatctctacgcgcacctaagcgagctaatggcagcacctggactacagccggggacgcactgcgcgctatggatgcagacaccagcaaggtagccgtgcacgaactgattcatgccgccactgcacgcgccgttgacagtaatcccgagattgctaagcgcctggaggaagtgcgcgctgttattgcagcagactccaccttgacgccgcgtatgcggtattacgcaagcaatgtgcacgagatgctggcaggcttaggcgacagccctgagtgggttgagcatctggcgcggacgaaatccccaaccggtaagagcatgctccgccaactgggtgagtacatcatgaacgccctgggcatcaaggccaaaggctctgccttggaggacgtcctggatgcgtatgaggacgccgttaagtggacagctaaggactacgcagaccaagcccagagcttccgtagcgaagccttccaggacctggcgggcagcactaccctcaacgaggctaagggtgcccaagctatgctggacggcgctaagaagaagctctccactatgtttgccctgtacgataacatcgcccaaggcaacgaagacttggctaagctgctagtgtcggatgcgtccgccgtagggggtcgtcgcccgtccgtagtggacttcaaacgcaaccttactttggagatggacgccagcgccagcgtagtggaagacgctatcctgggtgcgttgaaggataagggtgtaggtttctctgagcgcttcttccatcggagcaagttccgcgctgagcgggctgcactggaagaccgcctgagcaagtacctggatgctgcctacagtgctgatgtaaatggccgcgctgtgccggtgccggatgcagagattgctccactggttgacgcctatcgccgctctggctgggctagcaagtggcacgagcatatgctcaatgcaggtctagtggatgatggtgcgttggttaaatccgactactacttcccgcgtcagtacagctatgacaagatgcgtcaaggtatcgcacagggtaacactctggacgactaccgcgccctgttccggtccgccctgcgggacgtgtacccgagcatggagtcagaggtagtgcagcgtgttgccaaggagatggttgacggtatctataatggccgcgccgggcagtctggccctatgtggaagcagctgattaacggtatgggtaacgacgaggtcgttatggctatgcgtagcgctggtgtagatgagtctgcaatccagagtttcctggctggtaacgtacgcgaatccggtagcacatcccctgcgcggaatctgcgtcagcgtactcggttcaacatggacaaagagtatctggtgaacggtaagagcatgcgcatgcaggacctgatggatactgatgtagccaaggttatgcacgggtacactaaccgtatgtctgggcgtgtaggcatggcctatgcaggcgtacaggacctgggacagctcgctaagatgattgatgagtctaagcacgcgctagcggattccgctaagtgggagaagaccgtcaatgacaccatcgactttatcctgggtggggcacctgctgacgctggacagcttccggatttgctgcgtgcagccgggaacatggctaacgccaccatgcttaagaactccggcctatatcagctgactgatactgctttggccatgaaggagttcggtatggctagagtgctgcgcagtatgcgtgaccagccttggttcaaggaaggtgccgtagctatcaagactccggatatggctgcccgtctagacactgtgctgcgtggtaatatccagaaggagatgcgcttccgctggttgaatacgtacgccgacgataacctggacctgacccgtcaggcctcctggttcaacgtcactcagaacgttgggcaggctgcacgtcacgtcaacggaacgagtatggtgcaccggctgcaggttaacctgaactccggcattgtggcggatgagcttacgcagatgttcaagggcgatgctgaggcgtttaagcgtctggagcgtttcgggcttacccgtgacgttgcggaccgcgctatcgctgccaacaaggctaacccgggcgccatgttccagccggacctgcagatgcaagttgaggttgtagggacgcgtatgatggactacctggtacagcagattcgtaccggcgagacctcgcactttgcgcagttcaatcctatcggcaaagtcattgtagggtaccagagcttcgcactggctgccactaacaagattctgcgtagagagctgaacgatgctgggtggattggtgtggcccacattatggcgtaccagttcccgttgatgctgctggctactatggccaagcatggcatggacggaaaggatgtagacacccagaaactcatcagtgaatccgtaacgggtatgagtgccatcggcggggtatccttactgcaggatattttcctgggagattctcctcgtcactcgttggcatctatgggttacgtcacagggctgctcggggccgtacaggacctggctaccggtaatatggatatcaagaccttcactaagcaggtaccgctaatccaggaattcgcacctacgcgagctatcatcaataacttcggagacgattaatatggcgttcagctggcaagagtcggtaaagcctgcaggtactcaggatatccagtgcgatatcgagtacctggataagtcctatattcacgtttacttagatggtgctgagactactgccttcacttggaccagctccaccaatattcgtctgaactcgccactgtctgcagagacagtggtgctcctaattcgtaagactgaacgagagtatctttacattgaattctctagcggtgctccgtttattgaaggcaacgtagatacccagaatacgcagttcctgcacctggctcaagagctagttgaggggcgttctattgagggcttctacggcgatatcagtatgcacggatatcgaatcacccacctaggagacccagtggacactgcggacgccactaacaagggttacgtcgattccggcgacgcccgtctggaccaaagggtggatgcggaagaggctgctagaaagtctgccgacgctatcctggatacccgagtaactaatctagagcagacctttatatccgacagggtcactgtaagctacccttggtttacagtactggatacccccacagacaccgtgacgccgcccatcgcttttagtaaggccatagttgagctaaatgggcagggccaaatccccggctacagctttgtggtagtgggaaattcgttgctgtttgcggagacgctaccggccggtacgctcgtggcggctaggctgggcgcagatgtagaggcgggcgatgggtatgtaacccaggcagcttttgacaactggctggtctcagtaggcgaactggcgtacaagggcccggcaaacgctgtggcggatagtaccgacaccagcaacgttgccacccagctaaacgccctgttagcggagctgagaagtgctgggattatcaaaacttaaataattactggaggcacaatggcaggggcggctaaacgcagtcgcctctcggagctgcaccgcatgttcactgaggccttgattgaagaaatcaagcagtctaaggaagacgaggtgccgctccccgccgcagataaatcggttatcgccaagttcttgaaggacaacgacatcaccgcggatgcagattccgaggagatgcaggaccttcgtgacgagttcgatgatgaactagcggcgcgtagagaggcgcgtaagcaagaaattctaaataaagttggtggttcagactctgaggacttactagaaggaattgtctaatggtatcggtgaagactgcgcgaagactgcgcatgctcaaccagaaacttactggttatagtgcgaatccgcgcagtattcccaaagaggagcgcgaggacatcgcgatgatgatggccgcggcgctaagtgacttccgggaattcgcatacataggtatgcggttcctgggttttacattgacggacatgcaggccgacattgcagagtacatgcagaagggccctaggaagcgcatggtggccgcacagcgtggtgaggctaagtctacactagctgcactgtacgccgtctggaggctcatccaggaccaatcctgtcgtatcctgattgtgtccggtgcagagaagcaggcctctgacgtagcgaacttaatcattcgtatgctagaaacctggcctctactgtgctacttaaaggccgaccccactcgtggggaccgtacttcattcgaaggctatgatgtcaactgcgacctgaaaccgctggataaatccgccagcgtagcctgtgtaggtatcactgcatccctgcaggggaagcgcgcggacctgctgattccggatgatatcgagaccactaagaacggtttaacgcaaacccagcgtgagcagctgctgatgatttctaaagacttcgcagctatctgtacgcacggggatacgctgtacctgggcacaccgcagaccaaggacagtatctataaaaccctgccgggacgcggcttcgaggtccgcgtgtggcccgggcgcattccgtctgttgaaatggaagagcgatatggaagtacacttgctccttatatcctggagcttattgagcgcggctataaacgcaccggcttcggcgtcgacgggacgctaggcgagagcacggacaccggacgctatgacgaggatgcactgattgagaaggagctggacttcggtccggaaggcttccagctgcagtacatgctcgacactacactgtccgaccaaatgcgtacgcgcatcaagctttcggatatgctggtttactctggtagccaggattcctcccctgagacgttctcctacatcgcggaccgccggtacctgtaccagcatgagcatgaggggattatgggccagcagatgtacttcccggcattctacggggacatgcacctgccgtaccagcataaggtgctggtggtggacccggctgggtgtggcggggacgaagtgtcttacgctgctggtggtgctgcgaactcgtacatccacctattctccgtaggcggcttccaaggaggtatcagcgaagagaacattgataaactgattgacctatgcgtagagttagatatccaggatatggttgtggagagcaacatggggcacggtaccgtgtctatgcttatcctgaaccgtctgcgggagcggcgtctcgccggtattggcgtaagggacctgaataactccacgcagaaagagcgtcgtatcattgacacaatcagcccagttactcgtcggcaccgcctggtagtgcacgagcgtgctatccacgacgacattagtacctgtatggcatactcccgcgatagacgttggctgtactccgcgttcgcgcagttgtccggcatcacgtacgaccgcggtagcctagctaaggacgaccgagcagacgcaatcgctatgatggtggctacgctgaacgggcacctggtggaagatgagaaagtggtggctgagcgtgagtatgagaagatggctcgggccttcattgagaacccgctggattgggcacagagcaaagtgtctaagggccttcggggtgtggctgctaggttgcagaaccgtggcagaggtaaacaacatagaggaagaagataatggcatttgcagaagcaacactggcacagcgccaggcagtacgtaatgcggcagtggcgcttgataaagcaacaaccttggcgcatgataccggcccactagatactctgggtccggatgtagatgcagcaggggctgtagcagtggcggcactctctgctgcaggagcctctgacggtggtgctgtagtggtggttggtaacggcgcagaagtaactgcacctattacgttcaccaccgctcgggaggcgggggctaccgctactgtagcagcaactatcactgtagaagatggtgtaatcacagcaatctctgttgagtaaggagcaatactatggcaattgcaaaagcaaccccagcgcaacagcaggagctgctgcgccagctgaacattctcggtaaggacctgtatgctatgcttacgcagccgcaggacgtggcccagacgggtgctaccttcgataccaagattgctgcgctagaagccgcggtagccgcagtgaaggctgctagctaatgcgtaaactggtcgctgggttactgctcgcggttactctgactggttgctcggcgacctctgcactcaccggcttagttggttctaagccggatgtatctgctcaggttggtgccgaaaacaccaagcaaaccgttggcttgaataacaaggtggactccagcaccaccaacaaaaccgatgtatcagattctaacgtaggcactttggacacgtccagtaaggagcaggtgcaaactattagcaccggtacaatccaggcagagcgcctgcaggtggttaacaatgatagttacagtcttatcctcgccggattagctggggccagcattcctctggtcttcctagtggtcattctggtgattcgtaagctgttcaggaagaaggagcagcaggatgattaaggtaggggacgtagttggggcagacctcgctacccgggcaggtgcggcagttaccggcgctacggtatcaggaggttggttggcagagttaatgagctggaactggagcactatcagcttcatcactgcgacggtgtgcgcggtgctaaccctggcgtggaatgcgtattacaagagacgtacattcaagctcctagaggagcaggcacgtaaggggactattaaatatgagtttaaggactaaggttattgcggcccttacgggggccactatgcttggcggtgccattaccggggtggttcagcacaacgagggcctgagccttaccgcctacaaggatagcgccggggtccctactatctgctatggggagacaaagggcgtcaagatgggtcagagagccacgctgagcgattgtcagaagcaactgatacagtcagcaggggaacacgcaaaggcccttgacgggcttcctatgcagctctctgacgtatctctggtggggtctgtggacttcatttacaacgtaggcgtagctggcttcaacggcagtgctgtgaagcggcatctcaagagcctggattacgcagcggctggaaaggctgtactggactggcgctatattagcaagtaccagcagaagtcccctggcaccggttgggtgtacaagggcagcaaccgctggaccttcgactgctcccagtatattaatgggcagcgcaataaagtgtgctggggcctatgggagcgcaggcagtggcagagcaaagccatcgggaaccagtacaagaacgtaagcacagccctggctgaattgaaacgataagaggggacacatggcactagtagagaacgtacaaacacggtactacagccaagacgatttgtggtgcagagtagctgactacttagcgaaggatgccccggtacttaccggactccgtccggattcttccggtaactatgcagccgctattgagcggatttccgctaaaggtgtaaaggtgctgcgagtacctgtggggtcttattatgttggagactgccaccttactaaccctatgctgtttataggtgatggcctagagggtgttaacccgcttggggctgtattcgttaaaccgagcacagccagcaagatgttctactttgacggtacgagcacccgtggaatgggcggcgggttccttagaatgcgactgcagggggctgtcagcagtgattcgggacttatggtggaggtaacatcctggagctattttggggcggaaaactctgcttttaataacttggcgggctctgcgctggtgttacgtgactgtatggagagccacatctccggaaacttattccgtaggatgggtgcctctaacggcagcgttatactcctcggggattacataggtattcctaataacaacgtcaataacctgcacattcagaataacacgttcggactgtgctcgggcgcatggattaagagtacagcaaacagtaacccggacctggtgtggattacggataataagtttgagtgggatagtgtaccatacggggctaacacagctgcacagcacgtactggactttggacagctgtcgcgctcttggattacccgtaatggttttgcgcacttccgcccggactccgaccataacctgtatgccgggtgtattcgtattaggtctggagctgttggccctattgttatttctgataacaaggcgtatggatgcgaaggggaattctggaccattgaaggtggttatgtagatgccttcgacaatgatgcgaacattgcaaatgccagcagtgttctatcctggtcactgagtagtactagggcttgccgcatcaaccctccgcgcgtgtacagtgggaacatgaacgtagtgcgcggggatagtccgttcggccctgggtttatcgggcaggcgtacatgcgtggcgctgctgctgctagtcgtaccgctagggctggagccgctagtactgtagcactggatgttcccgcgggtcaggagatgcgtcggtaccagttgccgctgcaccttctcggggctatagtgcgcgtatccttgcgagtctacaacccgggcgctactggtaacataaccttagcggtgggtagtggcggctcctctgttgccgcggtaccggctggtccagggtggttcgatgtagacttttacttgggtaacagcctaacgggtgacggagatttgcgcttcaccaacagcactggaaacacactgagcctggatggtattacagtagagcgtgctcgttctgttccatttagccttgcgtggacccctggtgctgtcgctgccggtacgctggtatctagccctgtacagactctcccgtacggcattactcaagcccctgtcggtttgagttctccggtatttaacgggtctgttgatgggctgctaactggtgtcagtagctacagtgggtacagatcctacaaagttactctgtttaatcctggggctgcggcaattacccctggggctactcgggctagcttggtgctgcacttctaacgcacagcgtaaagcccaggcccagtctaggcgagcaggtctatacctggacctgaaatttattagactcacgcgagcccctccctcaccctgaacgcgcccaattgcccccatagggggtacctagcgtcaatttagggggggggggggcactgagtgggcctgctagtgcgcaccagagggcctcagcgggcctgtgctgcgttctagggctatcgctagtgctaccctatgcctgtccttgtgcgttcactagggcgcttcctgtgcgctctcagtgcgtgctatgaggcgctagggctatccctgtgcgctccctgtgggccataggggcgtgctctgccttgcttattttgtgcctgtccagcggggccagtagtggggccatagtgggccagctagtgcgctgtagtgctatccccggtgctatccctagtacgcactaggctatccactggctatcgctagtgctttacattgtgctgattatatgctacgctgcgcgctccccactagggcgcacttccactatccagcgctctcccaatgctatccctttgctcttactttcattcgaaagctattatgaaatgaagtaaccggagtaggaggggtttagggacactatatacactactactcactatgcactccctagtatgtccctgtgcctacgcagtaggctgacatacctacacagtcaccgcatcactacgtggcttcactctcgttacgccactgcgttctgctctttgtagtattagatagtattggctcgtaatggctagcagtggctacagctagtgccagcatagggctatccctgatgtggttctaagtatttaccctgcttaccctttttgctcccggtgataaaaagcttaaaaaagtgcttgcttcttttggttcaatgggtctatagttcaatcaccgggaggcgctgaggtgctaaccggggccgagccgggaggctccgctggattaaagctagatagtgcgaagggttagacactcgataaaaagagttgacaccgcgaagggcataagctagattgagtccaagcagtaactgaatatgtcgtgtaacagtaaatgcgcgattggaaccctaaccacgatagggcgctgagaggctaacagcgagataacccctaagaagtgatgctcatcggagtttagggaaacaggctggttgggaactaccgaataccccgagctggacagccagcaagtagtaagaaataaacgcttgacaagttccgattcactgagtaacttagatagcaagcagtaagctgatttgcggggaggcccagtaccttgactggtacgatgacgaccgagcctagataatcagttaaaaagagtaagcgtgccggacgttatcaccggggttctgaggcaaaccatactgccgaggcgagagcagctcgctcctctgaatcgagggaacaaggcgcggagtgtaccccgcaaagagcatataacatagcgtagcagtaacaaggctgcgctagattatgtactctgagaggtgagattatgcgcaaagcaaaacgcctagcattacggcggaatatgcagttatcacttaaccccaccgataacgtgccgcttactgtgaagcccagcaaacaagggttgagcggtgagcacagggtgaggggaaagcaaaaacaaaagggcggcagtaaacagcctagtgggtggcctgctgttaactcccaatttgggcactaattacagcctatagcatcctatggggtgctatgtggagtaattatctaagcaactagggaggtgccaaatggttggctacggtgaaggttaatagcctatagcgtcctacggggcgctatgtgaaattaaccgatagtaaatcaatcaaagaggtgtattatgacccattcaactggtaaagtattcaagctcaccgctgctggtagcattcgtaaagcgctgggcgacgtagtggaagcaaagcgtaacatcactatcagcgcgctcttccacggtcttatcagcagcaacgtttcctgggctacggatatgcagcgcagtgacgctgctgactttgatatggtgctgcgtacgctattacccatcaagttcaacaaagagtccggcaagtacgagttcaacgctaagaagtgctatgcgtcggctgagaagctgggaatcgaactggacactatgcgtcttgactacaaacaagctgacaagcagggccgcgaagttattgttgccagcttctatagctcctgtatggccctgtacgctgccgaagcggagcaggtgaagaatgacgcgctggacgctgatgcagtgcgcttgcaagcgctggggcgcgttaaaaacgccattaagaaggccaaagagactggcgtaagcgacgcagatttggtgagtatgctcattaatcagggcgtggatgtacgtgctgtgctggacgcaactttgaaggcagtggcctagtagcaagcctatagcgtcctacggggcgctatgtgaatgcaactggcgtatgaggtttcatatgaaagcaatactggtctatccgggccatgaactctggcccgtgtggtgcaatcggatatacgaagaatacagctacactgtggttatattctctgacaaagacactaatcaggaatcccctttagaatttgtggatacctacaccgaaatggctgcccgcactgtgctggacgccgtgaatcttggcattatcaacgactggagacaactctatggttaatgtattcaacatcattgtgaccagcgctatgctggtgctgggcaacgacgtaaacaacccggtgccctattgcacagtgcagttgcagcaaccggcggcgcaggaaccgcagccgcgccctgagtatgacctctttgaagaccccgagggtggttgcaaagagctgggcgcgcgtatccttgcggcggtgcaggagcagtacccggacgccgctgtaacgctcacggtggacggtaagagcaacaacgatatttgaggtaaggtatgcacggaaagaatcctgagacgctgctgatgtgtaggcagcaaccaacaatcgaaggactggcgcgagagtacagcgcgaaggcagcgctgcgccagcactacgagaagcaagcgcagcgcctgggtatgaccttgcgaggctactgcctgcgctttaatgtacgaggtgtagtatgaagtatgacgtgtaccgagagacctatagcggtctgtattatctcatccctttagagggggcaattaatgagcgccgcatacttttaacctctgcgggattaatgcggagcagttaccgagcaggtgacgttatcacctctccggcttttgtgttggtgtcacgaaactgcgttcctaagagaagcctatgctaacagtagacgaaacagcgctgctatgctggcgtctgctggaaacgcagggcaagtgcggctgcacttgggaaacattcaaagaggttcctaatgaactcaagcaaatcataccggtcgagcgtagactcctccgtgttcgtaggcaggactctacggtggtgctcaccacgtaccgcgagtatacagagtctgccgcgcggtagttgcaagagcacattaagttcgatgtggttgcagcactgctacggtacggatatcgtggagcctatacaagatttagggcggctgtgcgctcgtattataagcaaagacagctcgctgcgtggtatgcgcgctgacttggcagttaacgacgaactcattgaatctattcaggagcaaattaaaatgcaagagactatcaaagaaactgtcacagcacctatcgaatggaaagtagtgttgccggaaggtgcaaacacactgccaattaaatgttcgatgtattccagcggtgattactggaccccgttccaggacttgcaaatgcaaggttctgaccaccctcacaatgagggtccgctgcaggcgcttatgggtctccgcactgtcagcgcttacacccctggcttagaggtgactataggcgggatactgcaccctgagtaccgcgaagtaatgatgactcgcggcccgttgcaaaaggtagacctgtaccggtctggaactttctacgaactcttttccccggcgcgaatcaccatcgacagcaagttctgggaacgccgccgcgacttctatgagggcgatgatgtagtggttgagcgcgtagttgctagtgtagaagagttcaccggttacaaggtgcacaagcaggccgtgcagttattcgagcgcattatgcttgcaccagaagagcggcagcgccaggagtacactggctacgattacggacgccacctccgcgatggcaacgccgctgcgctgctcatgaagttgcacggcttcgtagtgtctagattcgccgtgcctttgggctttggtttccgcaacggtgagcccatcgtgatgctggggcagccgcggatgcataaggacttcgccgcagttaatgagtaccgttgcgtagagatgcgcgtcggtaagtggctcgctaactactacggaaacggggtagacttccgcgatgctatcgaagacctcaaggctatgaacgtagaccctacaacgtacctgtgcaagaccgagcaggaatggtacgacgcctacgagaatggcccgggtagctgcatgagcgggtactcatttaagcatagccctgtgcggacgtacgccaccaccagccacgggttgccggataacgggttgcgcctattcatccagtataccggggagcttttcggggacgacttcgaagtgctggcacgagcaatcgtaaaacctgaaaccaaagagtacgtccgtgcttacggcaacgctgcggatgcaatcctgcgggggcatgggtacaccagaaacactgaatgtctcgagggggtaatgctggcacgcataccgcacccaacctacaacggcgcagtgctgatgccgtacctcgatagcagccagtgcggtgttgatgaagaaggcagtgacgcctttgtaatccgtgatgactacgagtacgaggcgcaagaagccgatggatacatctacgtaggcactgaatctgctcggtgctgctgctgcgaggggcgctactccattgatgatatgcacgaaaccgccgacggtgaaatggtctgcgacggctgcgccgaagatggggactttgtatatgtagttggccgagaagggctgcataatcgctggagctgcacttggtctgattaccacgacgcctatgtatatgacgcggacattgagcactgttcggtagagggggtagtgcatgaccaagaagaactggtgtatgcacaggaccgacaggtgcttattgagcacgcagaagaacaccctgtgcacgggttgattctcactgagtatgcagccgattgcttgggggagaagtatctgggcaacgacgatgaagaaatagaggaggcagcttaatgttcttgaatccgcatgggattgatatgcagctgctcttgcagatactgcaaacgcaccggcctagctggggcagcactaagtggtttgagccgctgcttatgcaggcgctgggtagtggtatgcactacgtaaaggacaagcacgggaactacttcgtgctggtcggggactccgaacaaagtgacgtagcgtttacgtcgcacctcgacacagtggcgcgcccaaccagcgctgcaccggacgtcggctgcactaacaagggcgtgctgttcgtaaagaatccgcaacaagctgactgcttgggggcggactgcggtgctggtatctacctgatgctggagatgctgcggcggggtgtgcacggacgctactgcttcttcgtggacgaagaggttggctgcgagggtagcgctgcatcggttaaggatgactctggattttggactggggtcaaggctatgatcagcttcgaccgccgcggcgacggtatcattacgcatcaaaggtatatgcgctgctgctctgacacctttgccaagaccctagcagagcgcctgggacgcacggagcagcacttacagaagggggtgtacactgactcagccgagttcgttggcatcatccctgagtgcaccaacgtaggtgtagggtacatgcacgagcacaccccggatgaggtactggacctgaacatcctggggcaagtgcttgagcgtgtactacaagatggcacgttctcgcaccttccgattgagcgggatcctagggtagtagaaccagaccaatggctctctgcaccaacgctcagtttacggcagccgtgggacatgccgcctgctgaggacccgcagttactggcagcgttccgagaggtatcacaactttctaagcagcaactgattagctgggtgcaggagaatccagagaaggcgacggagtacataatggtgttctccgattacggctttaaagaagaactgattgaactaggcacccgagtcgtagaagactggggcggatacgataatattgtggagggttgattatgtctaagtttaaagttggtgataaagttgttcgcaaagcacacaaaaacaattcgtcgctcaagtcgtacctaggggattttgcttactacgtaattacagatatagctacaagcggccactggctgcagttggataactttacagatggaggagccgacccctacccgtggtacgccgataacttcgagctgtatcaagacccgaaggatgagctgccgccagtcccggacaaggtggcctacatgaactctaagcgcgacccgggaaatgaccaacgcctagttcttgagaaggataatggggatggggaaggtttaatgtacatcggggtagttcctaagaagggaagcactcgggcaaaggttgagattgggattaacatcgaccccgattcagccctgcagttggcacacgacctgcgccgcatggctatggaaatcaaacggaaggagaaagcaaatgcctagtaccataaactatagtaccttgcctgatgccctcagaacggcagttccatttacctggggtgcaaagatttactgggccataaaatctcctggtggggatatgttctacctgcatgacggggcaccggtgctgttgaacgagcaccagattcttaggcaacccgacttgacttacgccactaccctggaaattaagtaatggaccagccctggcttagagcgtgcaagcgcctggccgtagggcagagggctcgctttcggtgctgcggcagggacgccgccggggtgctctacaataacccggatgcctgggaatactattgccaccgctgcaagcaggtgggcaaggagcacaagcagtaccagcgcatacagttacaggaagagccgagggtgcagccctctgcacctgcagatgcaatttgcattagccaagcgcctgcggaaacgcagagttttatttacggattcctaatcacaaagggaatcatgcctgaaatggtgggggatgcagaatggagcaaagagaaacagcggataatcttccgtgtcggaagggctgctctgggtcgtgcagttcatgctcgacagcaaccgaagtgggtaatgtacggccaaccaataccattcgctgccgcggcacctgccgtagcaccggatgtagctgcggccgcacctctaaaggtcgtgctcaccgaggactatctatcagcgatcaaatatcagcacgcgattacgaactactctgcaatgaacgtgcaggctatagctatgctgggtactcgcttgcccgtgcagttaagggcgtggctgatacagaacaaaccgacagtgatactgtccctggataatgaccaagcgggacactccggcgcggccatgatacggcgcgcgctacgtccctttatgtcgtgccacgaaatctactacgacggggacccaaaagaggcaacaatacaggagttattagatggtattaggcgcgtgtaaagagcacaaacagaaaggcggaccaaagggttacggaaataccacgttcaaagggcggaagatacccctgcatagaaaggtgtattgctcggcgaacgatatatctccggagagcatagcggggctagttgtgcgccataagtgtgacaacccgagatgtattaatcccgagcatttagaattaggtacggtcaaggataacgtccatgactgtattgcccggggtagggctagacgtggagtttctaaaggggagcagaatgggtactccaagctaacagcgcagcaggtggactatatcaggaagacctacaggcggtacagcagggaacacggcacaccggccatagctgctagccttggtgtaagtgtgtcagcagtgcacgatgtattgaaagctaaaacttggaggctctaattggacctaatagttgttcgtgcaatgtgcacgcagaaggtgtggaaccgactgcgtgaacagatacccaagtccatgctcgcgccggatacgtcgaacctactagactgggtggggttgtactggaacacgtacccggagcaccaggaagtgcagtgggatgcgatgcagagcatgctcaacctccgggccggtcacttatcccgggaagagagggtaatcatggacgagcttatgcggggagtacaggccgtaccgcaggattctgtggtggggattgtccagaccctgaacgagctggcctacagcggggaggtagccgcgctgacgcaacgctatcaggatggggaggaagttgattacctgctggaaatgaagcacctccagcgcaagtacggggacggtgctgctgttcatgattcgctgcttgaatgggagagcggtagtgttgacgaaatacttgccgcgactgacgagagcggcggtcttaaactgggcgtgttcgagcaacttgctagcaacatccgaggtctacgtggcggggactgtatcgcagtggctgctcctgtggactctggtaaaactagtctgcttgctgctattgctgtggattttgctgagcaaatgcagcagcagccggaagtgtacggggaccgccctatcctctggcttgttaacgagggtccggcgacgcgcacagtgccgcgggtatatcaagcggcgctgcattggactctggcggagattaaggaccggcacagtaagcaagagttcgtgccagcctacctcaagaaagtaggcagggctgaccggattcgtgttaaggctgcgcactcattgacgatggcgcagatatccacgctcatggaggagatgcgccccgcggtaatcatcatcgacatggtggcgaatatccgtggcggcactatggagagtgagcaccagaaccttgaggcgaaatggcaggagctgcgtatccttgggtgcgagaacgactgcgctattgtaggcactatgcagctttcactcgaaggttacaacatgctgttcccgccgctcaccgctatgaagcagagcaagattggcgtgcagggtgccttggacttggcgattatgatgggatgcttggacaggaacgagcagccgcacatgcaaaacgtccgtggtatcagtactccgaagaacaagatggcactgtctggtaaagaatcgctcctgcaattcgaggtgggattcgagccgggtcgttgtagatttgatgagggccaaattaatgtctaagtttaaagttggcgataaagtaaagcgcagcaccgttgtgccgcgtgatatattctaccgcactggcgtgaagattggcaggacttacactgtgtgcgccgtaagtgaaagcggcgcctacataggactgactgaatctaaggagagcacattcaactttgatgcttatgcgttctctcttgtatccaccggtgctgcttgggacgtaaacgaagcactgcgcctgcgcgggttggcagtacaagcgatacaggagtacaacacttacctactgcagcagccgctgctggaggctatcgaacctccgccaccaatcaagtgacttccctagcgccttctacgagggcgctatgtaggtacacaggagggtttatgcaagtagactatacaggggttatccaaaaagcggattacacaggacttatacgcggtagttacgtggtgcgacaccgcgttaccggggaattttgtaccgtggaactcggggcacgttacaatcagagagagtgggatattgtagggcctatatcactgctgggagatttactagtatgcttaaaccgtcagacatcaactacctagacgacgaggtaatcaaggcgtacgctgcatctgcaggtactttccgtaaacgattcgcactggacagcagccagctgattgtgcatctggctatcaacaaggctcggagggctaagtggaaatgaattgggatatttggtttacctacaaagacggcaaactctactggaagcacgaggttagaagtgggcgcggacgcagccacctaaactgcgccgcaggttccgaggcaggaactctgaacaaagtacatggatactggtacgttaagctgcataataagctatacaaaagaagtttgatagtatatgagatgcacaacggtacgctgcgagcaggccaccatatagaccacataaatcataacaggttagaagataccccagataacttgagggcagtgcttcctgagaagaacatgcagaacaagtccctatatagaagcaaccgcagcggctatgtaggggtgcacaggaagagaggtcgttggatagcaaccctaggaaataaacaattaggttcatttagcagtatagagcaagccgtagagtgtcgtagactggcagctgaggcggcggggtatcaccataatcacggggttgcagtatgactagcagtattatgactatagaccttgaggtcgagaataatccttactatggtagcaaggctagcccctactgccctgacaactatgtagtgcattcggcctaccgcatagaccggaccgaggatgacggcacagttaccgtagaaccgacctttgatatcagattcaacagcaagcaggaattccttgacgacgtagccggggagcatctgtggttccgcataccttctgattgctggtgcatcgtggcccacaacgcagccttcgaaattagctggtttttaacatatcagcggcaacactttgaggaattcctaaagcgcggcggccgcgtattcgacacaatgcacggggagtatattgtgtctgactttcagagtatgtacccatccttggatgaaactgcgccaaagtatggtggggagcataagattgatggggtaaaaatattgtgggaacagggtgttctgacctcgcagatagaccccattcttctcagggattacctagtcaatggtgatataaagaacacggccctgtgcttctacggccagtgtgctacgttcacccagcgcaatcagatgcagtacgtgtgggagcgtatggatgccttgctggcttgggcgtactgcgaatggttcggcctgttcgttaatatgccaattgcgcgcaagaaccaggaggagcaggagcagcgcatctgtgagattaagcaggagctgcagcagtatatcccgaaggacctaccggagactctggatttcaacttcggctcggactttcatatgtctgcactggtgtacggcgggcctatcaagtatcgcaagaaggtgccctatgaccctccccagtacgtcaaggccgactactggcaagtcggggacacttgggttgccgtggatgacgtgcccgcaccgccaggtgcaaccacgtacaagtccggtaagaacaaggggctaccaaaagtattccgccttgatacagaggaggagaaacttaagtgggaggatgacctttacttctgcccgggcctagtgaacatccaggagctgccggaagttatccgggagaagtatgcggagcgtggagagttccgacaggcgcgcaccctgcaggacggtacgccagtatacagcaccagcacagacgcaatggaggcgctggcccgccaagggttcgagttctgtaagttggtgaatgagctggcggcgcttgagaaggacaccggtacctactatttacgggaagttctggatgcaaacggagaagtcaaagagcggaagggaatgctgcagtacgtaatacccgaacgcccagatggttccggtatcatacaccaccggctgaatacttgtgccactgtaaccgggcgccttagtagttctaacccgaacctgcagaacctaccccgcccggatgaggacggggatggggtggctaaatccaaggtgaagcaggtattcaccagccgattcggtgataacggccgcatcactgaggttgactactctgcgctggaagtggttatgtcctgcgtgcatacaggggataagaaactgctgggcttgctacaggcaggtacggatatgcactgttaccgcctcgctttccgcgagggactgccgtatgaagaagtatatgagcgctgccacaacaagaagcacgagctgcatccgctttggaaggcaatgcgtacaagtattaaggctcctagctttgcagcccagtatggcgctacggctaaggggattgcgtttgctactggatgtacggtggaatttgcacaggctttcttggacaacgaggctgcgctgttcccgcaaacaattggcttccgcgctgttgttaaggaagaggtagagcgtaccggtgcggagggtcgcatgtaccgggagcaggcggacgacggcagctatcgaatctaccgcattgggacgtggaccagccctgctggtgcccgctacagcttccgtcagaaagagcagtggaaggaggttgtgcctgggcagcgtaagcagaaggtcatggactacaaggaaaccgagatggcgaactactggtgccaaggggaagcattcttcctgatggcggtggcggctggtatggttctgcgtgcactcttggcccgtgactggttcgacaatcaggtgtgcctgattacgaacgtacacgatgcattgtatctggacagcgccaacccggaggttggacgtgaggcgagcctgctggttaagcagtgcatggaggatgcacctaagcgtatccaccagctctggcctaactacggtatcattggcgaggtgcccttcccggcggaagctgaaatgggtacgagcatgtacagtaaggagaaggtagaatgaatattaaacctggcagtattgtggagatgctggaacttggaccggagcctatcgacccacgacatcgtgcctactttgcaccgggtacgcagcatcgcgtgatatcttacgacgttgaattcggcgaggtggagctactcaatccggacagcaactcagagaagcctggggacggcatcaccttcttcgctggagagtacaagctcatcgcggagtagtgataggtggacccttgggtggtgtagggggttagggtagcatggaaatatgctagggtcaactaaataattaaataaaattatttgttgactctggcttgattctgtgattccccgagaattaatgtgatacgagtaggaacaacacaagagaggcaaccttggctaaagtaagtctaatcaaactgtggaccaaagaagagcaccaacaaattcttggcagtttcctaaataacactgatgcagctattgcgtacaataacaaatttcgcaggggggacgtaatcgtgtctcgccagcttgtacgctactggcgcagcatcttcatggataacaagggcagcaaggccagtgccaaccgcgggctgcaggaggcgcgtaagctaatccaaccaagcccaacggacgatatcgggaatacaaaggtgccggatatgtgccaccgcattctggttgtcggggacctgcacgctccgtatacccacgtagacgcaatgccgttccttgagagcgtacgtgatgcgtactgcccggacatggtagtgcaggtgggtgacgaaaccgacgggcacgctatcagcttccacgactctgaccctaacctggatagcgcaggggtggagctggagaaagccaagctcgtactggaggagctgcatgaactattcccgaacctgctggtttgcgattccaatcacggctcactcgtatatcgccgcgctaaagctcacggtttgccagtgcaatttatcaagaagtaccgggacatcttattccctgagcatggtgctccggcgtggtcgtgggccgacgcttgggtgctcaacacaccgctggggcctgtccgtttccagcatcaagtcagcggtgatttcatgctcaatgcatcccatgagcgcacctctctggtgttggggcatgagcatggacgcttcgaggttcagtatgctgcttcttcaacggcgctgtactttggtgcgtatgcagggtgcttgattgaccgcaagagcatggcctttgcttatggcagactcacccgcaagaaaccaatcctgggtgtgatggtaatcaccgagggttgcccgcagttaattccgatgctgctcgacgacgatggtcgttgggtagggagaagcaaatgaatgtactggattcaactgtcacccgagtagatgctcctgtatgggatgagcaataccaggtgtatcgtgtaaccctggagtatgactgctgggggcacaaatctgagacagagcggtggtataaagatgaagcctcagctcttagtttaaaagttggtgacataatcaaaacctaattaggagtgtcgatgaaaatgggaatctgttctgtactgggccttatctttgtaaccctgaaactgactggcgttatcgcctggtcctggtggtgggtactgcttccgttctacggcggtgtagctttgctgttggcaatcctggcggcaggcggtgtggcagcagccgcggctgcaggcattaaatccgcacttaagaatcgctaggccggacctgcatctgcacgtaaatatcatttaaactaaacgaggacgtaattatatgactacgaatgtactggcatccctgaacgctctggtagacgcagcaatcgaaacccaagatgtggatatgcgggaaaccgcacagggtggtgcgtacgaggacgtgctgctgccgaagggtgaatattacggttacttcaccgagtatgtggaaatcggtaagcgcctgccgaccaagggtggtaagcctaccggtaagcctgcagtggctaacgtacgtatcggcattgtagtgttcggccccaacggcgaagtgaagcgtatccgcccgtacccgatggctatcagtaactttgagcgagcaggcttcaagaagttcttcgacaagctcaactacgacaatagcattaagcatgcagcgcagcgtctgggccaggccttcaccttcccgattgatgagcacaccagcgccgcgggcaagaagtctaacatcgtggacctgtccggtatccgcccgattccgaagttcgacccgaacaccggcgagcctatcaagatgccagccctggatgcctctgagattaagctgttcctgtggaacaacccaaccaaagagacctgggacagcctacacatcgaaggcaccttcgacgacggtaagagcaagaactggattcaggaggatatgtacaaggccgtagacttcccgggcagtgctctggatattatgctgaacgctggctctgttccgagtccggcagctatgcaggcacctgctgctccttctgcaccggcggctcccgctgcaccgcaagcacctgcagccccagctgctccagtggctcctgcggctcctgtagcgcccgctgcgcctgctgcacctcaagcctaatctaccctaacctaaactaatatggccccgcatggggccttagaggaagactatgaacatcatcaacattctcatcaaactcctgagtgcagcctacacagcagaagctaaacgagcagatgccaaagcgcagtttaacgagcagctgtcagttaaattcgcagacgacgcagtacgtctggccgctcaatccgaggcgcgagtagaggcctccaagcacagcaaagaggtagcagaagcgcatgcttgtcatgctgctaacctgcgtgccaagcgtgacgaagtagctaacttcctgggggtataaatgcgcataatcacatgggccaaagaacagtacgctgtgtttctgcttctgcgcgcacagcgtttgcagaagcgagcagacgactggcgctgggcagctagctctcacgcatacagggcaagccttctgggtcccgagattagtgcgcagcgttatcacttgaatcgccagtgcgccaagtcccggcgccgtgcatacgccctgggcgcagaggccacggccactgagaccaaagcctacgccttcattcaaaaacacaaactgaaaggatttgactaatggataaagtattagaagcgtacgagaaccttgccattacggtcggctcagcggtatacgatgcagcggcgtatggggtgcttaatattagtctggacgacatctacaacgcactagatgagctggcggccctgtacggaatggacctggacctggccgctacagccttccgggagcacaacgatctggcggcacatgccgataagttacgaggagacgaccttgtacttatccgcgtagtgggcacgctcagcgttggcctggcggagattggctcctgtatctacgacgtagaccagagcctgcgtactccggaagtaatcggggacatgctcggcaccgtgctggtgctgtctgaactggaggcttaagtatgttgtacgtatctcgcgcaatttacgtagctttgattctcccgctgattccattggcgggactgtgctaccttggcgataagctgagcaaggcaaagtgggcagaacgttgggttaactgggccgacaagaaggcccgcgatattacggggcgctgatgattatcaacggggttgacttgtcccagcttagcgagcagttagctccgcagaactctgggaagattctgctgtacgatgcggatttttgcgtgtacaaagccgccgctacagtaaaacgtttggataccgcaatacgccgcttctatcagctggtgcttgaggacatgttcctggtcggctgctcagaggcagtggcgtacctgacgcctgcaggatgtgctaagtgcttgcgctggcacctgcctacggctaagccctatcaggggcagcgcgctaatcgacaggagctaccgctcaaggcaccgttgaagcggcacctgattgagaacccagaccagtattctgagcagggtattcaggtagtcagcagtgactacttcgaggccgacgacctctttgtaatggattcgtacagcttcggagaccggggaatcctgatgtcccaggacaaggattcttggctcagccctatggctcggttcgatataccgacaggtacagtgtggcctgcactggaggacccattcggatggattaagtgggatgacacccaggctatgcctgtacgagcacacgggttgaagttcttctggtggcagatgctagcaggggacgacgcagataacgtcaaaggcatcacgttgcttgatgggaagccctgtggcaagcgaacggcctttgatgctatctaccctattacctcagagcaggacgccgcagaattcgtcgtagcggcttacgctcgaaacaaccaagacgtactcgcagaggcagaatgcctgttcctgcggcgctccccgtcagattctgcctatcagtatctgatgtcactgttgactactcccagtctgcgtgactgggtgcattcgctgcacgagtaccataaacagcatatacagtggatacaggagcacccagacaatggcgaagatgtctgcgaaggaaatgagcctgcgggcgattgagttatactacgaggggaaacacgatgaacttgaaactattctggatgcgctgcgtgaacgagcacccaaaacacatcgaagaacggttgagcatttggattctctcattcacgacaatgctatgctggatgtagttggggggattgaggtatggtaatgagtacaccttgtatagaccatgggagaaaggggcggccaaagactgggttcctatccgcgtgggtgcttattgacggtaaacgccaacctacaaccgcacacaggaaggcgtactatgaacacacaggagagtggcccgaagtagtacagcacacctgtggaaattctcgctgcattaaccctgagcacctgcatggagggacccacaaaagcaaatcagcaaagggttccagcagcggccgctcacgtttgaacgaaggtacggtgcgctatctgcggcaaatgcacattcctggggaccgggaatggggtagcaacgctatagctagacgcctgggtatggctcaaagtacggtatatcatatgttaagagggatttcatggcgctgcgtaaaataactcgagcacagattcgctctgtggctattaagcttgccaaagaccagggaggtatatgcctcctctgcggcaaacctttggacttcacaatcaagggggtaactggtgattctgttgtcgttgaccactgtcatattactgggcgtattcggggtgctcttcatcgctcgtgcaatggaggggaaggcaaagtggcatctgccgctgggcgctggattgttggtagcatgcaatcttctggggctattgctgaatctctacgtagggtcgccgattacttagaccgagaacctacggatatgctatactatacgcacaagacgccggaagaactagcacaagcacagaagctcaaggcccgcaaggcccgggcacgacgcaaagcacgggagactattaaatgattgaatccactaaattctatgcaggtgatttggttgtgcgcaaagcgagtcacgtagggggtatctggaaggacatctgtgaacagctacaggtagacctagactcccccagattagtgacgtgcgcagaagacggacttataaccttagccgagtgtgggacctcttggcgagcggagttcttccagctcttccattcgaagagcgaggctgtttctgactcagtgaactctcctcggcactaccagttcttcccggacctggaggcaattgaggtgattgcacgcagtatgacgaaagagcagttctacggatactgcctggggaaccggctcaagtacagactgcgcgccgggaacaaggataagctggagcaggacattgccaagtccgacaagtactcagaactgtacgagcaacaccgaggtaagtgcattgacgcctagcgcatggtgccacgggatgtggcagaaagcagtagaacggggcgacgaaagctccgctaaagactatctggagatgtacaatctctgggtgagtcgcaatcagtagttagaagtaccggacataaccaaggagactaagcgcctatgattagcgccctgaatacggttgtagtacccgaggaagcactggtgaagcgccagctggagcttgaagagacctataagattcgcggaatcgagcgggcacgtaagctgattacggacgcactgcagaatggcgggattatgaacctgccgatgacgcagcgtatgctcacctcggcatatgaggtggctgctgccgctatcgatgagatgcgaaatgtcaaagccccgggcattggtggtaagtaccgacggttcctgcgcttagtccccttggacgtcctgaccactctgagcctgtgcacaatgtttgaggcgttcagcgtcgcccctggcgagtccgccagtcgccgtcagactgcacaggcggtaatgtccgcactgggcagaaacgtacagtcagagctactggctctgcagttacgcaacgtagcccctgcgtacatggaccgtgtgtatgagtacctcacagagcgccgtacgaagtcccctacgcacatcctgcgtacgctccgcgccagtgccgagaacgtgcactatgggcacgagccttggaccaatgcccagaacatctccgtagggcgtctgctgtgtgccgcggtgtttgagacgggcctgttccagtggaagaactgtagcgggaatctgagcatgctctatccggctgacgacgttatggaggccttccagaaactggtagagtccgctgacactgtaaccatgaagccgcctatgctggtaccgccggtgcagcacactactctgtgggatggtggatacctcacccctatcgacaatcgcgggacctatcataactcgcacattgacagagctcgtctccgtgaagtagcggaagcatttaagtccgcggatggcattaaaaaagcgcttaataaggcacaggaaaccccgtaccgtattaataagcgcatactggaactggtgcaagaagcacgggccatgggtgttgggataggcatgccgcgctcagtaccggagccgaaaccggagtggtacttggatggtgttccaaaagagaactacacagaggaagagcttgaccgttttggtgagtggaagacgcgcatgtccctgtggtacagcgcagaccgtaagcgtgtgtcgcaactgcgcagccttttgactacgttagaaatggcagaggaattcaaagatgagaaagctctgtacttcccaacctgcgtggattggcggtaccggttgtacttcaagtcctcgctgcaccctcaaggttctgatttgcagaaagcccttcttgagtttggcagaggaaaacctctgggtgatcgcggcttattctggctcaaggtgcatgtcgccacatgctttggttatgacaagaccttattcgaagaccgcgcagcttgggttgatgcgaactttgcagagattgagcagcttacagtttcaccgtttgattgccctgctttcacctccgcggacagcccttggtgcctattggccgccgctatcgacctggttaatgctgtgcgttctggatgcccagaagagcatattagccgaatcccagttgctatggacgctacaaactcaggtgggcagcatctctcagcgctcctgagagaccctgtgggcgggcgtctgacgaacctgtactgggagggtaactataagaaagctgacctgtacatggacgtgaagcgccgtacggacgagaaggtgatactggacctggacaaggaggatttcgttatccagagcacgtactggagagagaacgaaatcacccgcagtatgaccaagcgccccagtatgacctatttctacagcgctacggtgcgcagctgcagcgactacatcttcgaaggtgcttgcgccgagggatacgagggtgccgagactaacagcctgtggaacctgtcgtgctacctggcgccgcgtatgcgtaccgctatcgcagaggcgaacccagctgctgcggcagttatggggtacttgcagaacctcgctagacgcgtaccggcaagccagcatctgcagtggtatacgccgctgggtgggcttgtaatgaaccgttacacgcagcgtgaagaagtgcgggtacgcattgactgcatgaacctcaccgtcatgcgggtgcataaccgggatttcaagacctgtaacaagcgcaaggcagcctctgggattgccccgaactttgtgcatagcctggacagtacgcacttgatgatggttctgtgtgccgcggaagggttggacatcgtgcctattcacgactcgctggctacacatgcagctgacgttgacgctatgcaccgacacatccgcgaacagtttgtgagcctatacgaagagcatgacctgcttggggatattactcgcgcggcagcagcagctggggcggacttgacggatttggatatgccagaagtaggttccctggacatccggcaagtgctggaatcgcctttcttcttctgctgataaatgaagttaccggagtaggaatgaagttaaaacacactagtaaaacttccgattacactctcaaggttctgtataagtctgacgacattacagacgcagtgaagcaactgcacgaactgggccacggcattagtcggggcctggctccagagcagcactactggagagtgctgggaagtatattgggtaaacagtatatactaggagtctatgactcccaaggcggattagtcggtgctgtcagctactatccagaagctgtggaggactgtcattacgtagagcctgtgctgtatacagacttcttcgtactaaaaccggacaatggtgcggcagtgactgtgattatgcaggggatgcacgcgatagccaagtgcatgcgcgccgggcgtattgccattagccggagcacatcggataacacgtacaagacaacttatcatttagtgaggtcagaatgagtggtggtttaggtaaactgttaggtaaggccacggatatgctcggccttactgacaacgcaggattagaggcacagcagcgcttggcagagcagcaggccagcgcagctaaacaacaggctgccttagaggctaatagcgccgcagataacattgctgagattgacccagcaggggctgcctctgcatctgcagatgcaattacgtctgagcagaagaaacggcgacaagcagggcagagcaatcctctgggcctgtaagggggtagcttggaacaaaaagcaacattagcagagctctttaagaaggaccaggacgcgggtgtcttggatgcctctgagaagtttgcgcagtggacgctcggcactatctttacccgggacgattccctggacggtagacgcaggcccctggagcgtgattaccagagcacaggggcgcagctggtcaacactgcagccactaagattgtaggcgcgctgttcccgcaaggcactagcttcttccggttctccaagagttcggacctggacgagttcattagttcgctgggcagtgctgctacggcagaatctaagttggccgaggtcgagaacacggcgtcacagaaagtatttgagaaagacggttatgctgcgaagttgcaggctgtgaagctgctgctggttacaggtaacgcgttggagtatattgatgagcggacaggtaaatccatcgtctattcagtccgtaactttaccgttcgaagggatggaagcggtaacgtcctgcgactcattatcagagagcgcgcaagcgtccaggacctgccagagagtttccggaacaccttctaccgtgacaaagacccatacggcgacgttgatatctacactgccgcttgtcgcaaagttaagcggacagaggacggtgcagaggtagtaagctacgaggtgtaccaagaagcagacgggcaccgcattggagacagcagcacctatccggagctggagcttccctacaacgtgctggtgtggaaccttgttagcggcgaacactacgggcgcggcttggtagaggactacgccggggacttcgccagattatcggtactgtcggaagcgttgactaactacgaggttgagtctgcgaggttaatcccgctgattgacgcaagctctgggttagacgtggacgagttcgcaacgtcggagactggcgaggctgtgcaggtgggcggcggcggttccaacgggaacagcaaatcccccgtcactgcttacgagggtggctctgcccagaagattcagtggattgccagcaacattcagatgctcgaacagaaactgtcgcgtgcgtttatgtacaccggtaactcccggcaaggtgagcgcgtcacggcttacgagattcgccagaatgccaaagaggcggaagccgctatgggtggcgggttcagtattctgagcgacacatggctgcgtaagctggcgtacctgtacactgcactggtatatcctcgctttaagctgtacctcagcgaaggtgtagtgagcatcaacgttacggtgggtacctctgcactggctaaagccgcagcagcggataagctgctagaggcagcgcagtccatgcaactggctatcccggtgctggagcagattactccacgcttcaacaaggatgcgtgcgtagactggtacttcgacgcctacggtatcgtcagcgagccgttcatgtacacagaagagcagctgcaacagaagcaagaagttcaagatgcgtctgccgatgtatccgcaggtgcagcacaggaccaactccagggcttgacagcagcagacccaacagtagcaggtaagcagctgggcttattaccaagttaacaacaggggcatagatggataacgtagaaaacggtcagaacgtagaaactacacaggtagagaaccaaggcggccctaagattccgggcctaggtgctccccttaacgccccgaacaatcaaggcgtgcaggatgcgcccgcacctacccagcagcaacagggcaaagattcccctgaacctgctaagattcctctggatatcgaagccctaaaagcagccctggataagggtggcgatagcgctaaggagcagccccaggagctggctcagacaggcaatccgacgattgacgccggggtagctatgttgaagcaagtatctgggttaactgactctgatatggtgcgggcacttggtaaggccctggagtatcaggaccctaacctaatcgatacggccttcattaaggaacgtttcggcgagcacgctgcttacgcagagctgttggctaaggcgtacctggaagaccaggttggacaagccaccaaggcagtgcaggaagcttacgatattgtgggcgggaaggagaactgggaggtagcagcacagctgtttaattccaaggctcctgaacctctgcgtaacgcagctcgtgtactcgctaacgctggtgagcttaagcaggccgctgagttggtagcgggcttctgccgggatatgggtcttatcaagacacagaacccaatggtacggggcgtagccagcaacaacgcattatctgctgcggacttccgtgcagaatataccaaactccgtcaggaagcgggcaaccgtagcttggcatctccgcagttcagtcaacgttataatgatttgctcgcacgccgtgaggctggtaagcgcgtaggtctttaattttatttataaaggaaactaaggcatggctaacactatttataatggcaacctgactcgtccgcactggggcggcgcggcgtctgacgtagacattcacctggaagtgtatcagaacgaagtggatacccgcttccagtaccaggctctattcctgggactctccagccagcgctctatcagcggttctaacacctaccgtattgaccgcttgaacacctcctcggtgaagggtcgtcgctccggcgaggcgctggatagcacaccggttcgtaacgataagatgattatcgtggtggatacggtgctgtatatccgtaacccgattgactaccaggatgactggaccggtccggacttcctaaccgagatgggccagaacaacggctctgagttcgcagagaccttcgaccaggcgcacctgattcagctcatcaagggccgttcctgggttgctccggcgcacctgaaaccggcgttcaacgacggtatagaggtaggcgcagctatcctggttccgggtaccactaccgccacgcagctgacccaggctgagatggaggctaacgccatgaacatcaacctggcgcacaaggctggtattgatgagctcatcaagcgcaagaccccgctggcggatatggtcactctggtggatgtcgatacctattcgcgtctgctggagcatccgaagctcctgaacatcgaattcggtccgtccaacaacgacggttacaaagaccgtcgtgtagtgaagatgaacggcgtacctgtagtagagtgcaccgagttcccgaccgaggctggtacgcatccgctgggctctgcttacactgtcaccgcagacgacgcgctgtgccgtatggtgactttcagcaagtccaagaccctggtgactgttgaagctaagccgttcacctcccgtatctgggacgatacgcgcgagttcagcaacgtactggactgctacgcgatgtacaacataggcctgcgtcgtccggacaccgctgcagtgactaagttcaccttcaccaccaagtcctaattggaggttcaatggcagtaatcgctacgttcggtctggagactctccaggccaatgcagctcagcgggaggcggttaaggccgccaccgatgtagcgaagaacatccaggtggcctcggtcgagtctggccgcaaggctaccaagaaaacccgtaaggcggctgatgcagccgctgatactgcggaagagtaatacgcgcccctggtgccttcgggtgccaggggctttttttttgtccctgtcttaaaggtccaaggggtctttaatagaggaacaaatatgagagaattagacgctgtgaacctgacgctggaagccctgggggagtcccgcgttatggacatcaacactagtaaccctagcgctggattagctcgctctgcacttgcacgtaaccgtcgtgggttgctcagcacaggattctggtttaacgtggtcgagcgtgaagttacgcccaccaccgacggcctgattaaggtgccgtggaaccagctggctgtatatgacgcctgctcagaatccaagtacggggtacgtgacgggaacctatacgacctggtagagcagaaccaatacttcgatgcgcctgtgcgtattcgtgtggtactggatttggcctttgaggacctgccggagcacgccgctatgtgggtggctaactacaccactgcgcaggtatacttaaatgacctgggcggtgacagcaactacgctaattacgcacaggaagctgagcggtacaagagcatggtgctgcgcgagcatctgcgcaatcagaagttcagcaccagcaagacccgttttgcacgcagaatccgccgcgctcgttttatggtctaaggagaggttatggcgcaatcattagaaggtactattcagagcttgctgcagggcgtttcccagcaggttccgagagagcgccaaccaggacaactgggggcgcagctgaatatgctcagcgacccggtttccggtatccgccgtagaccgccgggtgagattgtatgggaaagcacaatcgataaccctgggcttgactccctgttcactgaatacgtcgagcgtggcactgacggtaggcacctgctgattaacaccagcaacggtaactggtggttgctggctaagaatggaaagaccatccttaattccggcaacgacccgtacttcgttaccaccgtaggccagacctctttgcagaccgcaagcattgccggactgacttatatcctgaatacggagatggctcctagcacaaccgtggacaatactgggcgtatcgaccccagcaccacggggttcttctacgttaagtctgcagcattccagaaacgctggaacgtcacagttacctccgcaggggtagactactcaggggactacaccgccccagctgctggcagcaccagcggtaacgctgaggaggtatcaggtgcctacgttgctcagcagctgcgggactctcttgtagctaatggcatgcccgccgggaacgtgagcgtacgcggtgcgtacctgttcttctatggactgagcaactgcgcggtgtcctctgacgccggtgatacttacgctggggtatccaaccagtcccgtgtagatcaggagcaggacctgcctgcacagctcccagcgcaagctgacggagcaatgtgccgtgtaggtacagcctcgtctgagacagcgtggtatcagttcagctacagcacccgcacctggtctgaggtgggggcgtacggcagcatcaccaagattacgaacatgcccagagaacttgccgcggatgacaatattattgcgcgggattgggaagggcgcttagcaggcaacgacgataacaacggtaatccggggttcgtcgagaatggctacattactggcattgcagctttccagggtcgcctggttctgcttagcggcagctctgtggatatgtccgcctcgggcctgtatcagcgcttctaccgctctactgtgacgtcactgctggatacggaccgtatcagtattagctctgcgtctgcgcaggattctgtgtaccgtaccgctgtacagtttaacagggacctggtcctgtttgctaacagcatgcaggccgttgtgccgggttcagcagtgctcacccccactaacgcaagtattagcattaccagcacctatgagtgcgatagtcgcgttactccggtcatggcagggcagacagtaatttacccgaacaagcgcaacgacagctacgcgggtattcttgagttgatcccatcgccgtatacttcatcgcagtatactacacaggattctacggtgcacttaccgcggtatatcccaggcagggtattgcagatgcaaaactccagtgtcaccaatatggccttctcgcgcatgtctggggagcgtagtagcttgctggtctacgagttcatgtggggcggaagtgacggcgccaagatgcaggcggcgtggcataagtggtcgttcccgtatccaatcctgagcgtacaagcgctggaggatgaagtgttcttgtacatgcaagggcccagtcccagcaacaagcttttgattgtgtctatggacccgcgtgaaggttaccagctgggttcggagtatcgcgaagcgtactcggatttgcagaagcaagttcaagtacaggacgggatattcaccgttccggcagtactgcgtccagttgggtgggctgaccgctatgaggaagagcttatcctaacttacttgcccagtaaccctatgggacctactgaggttggcataaaggagattgccggggagaacaccctgcgggttgtacgcggtgtacctgatggcacctacgtaatcgggaggcgttaccgcagtacgttcacgctaactacacctattctgcgggaccagaatgacaagctcgtggggagtgggcacgtgcgcctgctgcgcctggatgtggcggtacgtaactctgggcacttctatgtgcaggtactagacaccccacgggatgtcaactggggcggggaactgacaggtatcctgatgaactcaaaagagctgacgctcgggcaggtcctgcgtatggacctggctacgattaccgtgccatgccgtactaacgcagacacaaccgaggtgtcattatttactgagggttctatggaactgaatgtgctggatatctcgtacatcctgcgctacaaccaacgcagacggagaatttaatatgtggtggatggttgcggccatggccgctaagaccgttctggggcatggtgctcagattgaagtgtccaaggccaggaacaaggctgtgattcaacagacagccaaacagctaaacgacatcgcgctacagcgagcccagtccagggaccggactgaggtatctctgtttaacatccagcagcagaagctgcaggcacagagccaagtagggctgcaggcagcagcttccggtactatgggggcctctgttaaagacgccgtagccacagtgaacactgtagccggacgacaagaggccagcgtgcgtgaccagcaggcaactcaggaagagggtttccgtctaatgacggacaaggccgtggacagcggcctggctaacatggacatggaggacccctacgataacatgtttaactcgttgttgagtgtcggggcatctgccgttgggcagtacgctggtaacgctgcgtcgtctactgactctggtagctcaacacccggaagtggtgcagcagctactcagaacatggcgtcctcctatgatttatgggggagcaaaggtaacagctcagttcatacctggtaacttaagaggaatgtcaaatgcctgtgattcaacccagtagacaggggttaagtatcggaggagtgcaactgcagtccaacgatgttagcttaccgtcaacggtaagtgaggtgtctgttgatacctccaaagcaaaacgcctagctgccctgtcagggttcgtgcaggacttcggcgtagggtttgacgaagcagtaaaagaaaacgctgcagccgcaacggtgcgcggcgcaatggatgcccagggcgcagtagatgcaatggcttccaaagatgaggctgtacagaagcagaacatcttcgtacgtgaggcctatcaggatggctacgtatccgccgccgcgtacgactctctagccaagtggcgcacagatagcatcgcacgagctaagaaagctgctgagtctggtctgactgacgaggaattccagcagcaggagcaagagcacgtacagtcaatggcagacaagctcgggatgtatctcccggacatgtccaaacagtctgccacgaatatactgcagcagctccgtgctaccagcatggcgaactacacagccttccagaaaggtagagctgcgtttgccctggcgcaggctgaccgtgcactcgaccgcggccttagctcgtccagtgatgagttctatcagcgcctgcaggcgggacagggtgccgctgcgcagatgtctatcaagaccggtttagatagcatactggctgctgagcacttggataagagcaagaagctggaccgggccaagcagtatctggtcagcgtggcgcagcagacgcaggacc

SEQ ID NO: 48 - DNA, 44842 bp, Unknown
  source: /note="Description of Unknown: KP2M-P0208 Bacteriophage sequence"
cgcgccgctagttcgtcatcgaactcgtcgcgaaggtcctgcatctcctcggaatctgcgtccgcggtgatgtcgttgtccttcaagaacttagcgataaccgatttatctgcggcggggagcggcacctcgtcttccttggactgcttgatttcttcaatcaaggcctcagtgaacatgcggtgcagctccgagaggcgactgcgtttagccgcccctgccattatcttaccctcatagctctaatataaccctgggcagtgcaggtcctggtaaaggtggcctgcgctaccaggtatacagtggttgttgcactcaacagtagacggcgcgacataccctgtctggaagaattcccagctgctaacgtggtggttatagaatataagtcgtaccagtttccaggtaacactgcactggtgctactaactccaaaactgagagcagtaacgttgccgctattagtgactaacagggcactctcaagctcgtactcccccgccggcaggctcaaggacagaacgttcaatggggtgccgctggtaacacttacggctgcagaggttgcggcactcagtacttcccccactacaccggcggctgcagctgcaccgtcagtgcggccggatatacccccactcaatcctgttaatgcggtgatgtctccgttgctgccggacgccgctgctcccaggttagtcctagcagtggcggcatcgccagctccggtgcccccctttgtaattggaaggctgccagttgcccctaaggtggcattgccagaaccatcaaaactggccggtgtagtggatgtcaaatctaccaccaaagtccttgctgtggctagcttcgcagctgaatcagcggcaccagtagtgttgccagtaccgccttgagctttactcagcggtgtagttaatccacttaagctcgtgatatcagagttagcaccctttgctgccttggtcgctactgctgcttggtaatccagaattatctgtgcatcggcattagccctggctgacgcctcttcccctaatgccgtagctgtagcgtaagtttccgaaagctctgcatcataccccaatctggcagacactagagtaccagctggaagtacctctgcaaacagtagagtgttatccaccacctcaaaactgtagcccggaatctgatttacgccttgtacgtacactatagcctttgtgaaagacaatccaggcgtaacttcgtcagtagcctcggccagtatagtataccagggatagcttaccgtaggctcccccgagataaaggtctgctctaggttggtagtacgaacatcgagcgcatcgtctgcggctttgcgcgcggcggcttcggcatcaatacggacacctagtgccgcatcaccagtatctacatagttcttggttgccacatcctgcaggtcttctgggtccgctacgttagtgatgcggtacccgttcatgcttatattcccgtagaatccggggatagctcggccttccacaagctcttgggctaggtgtaagaattgcgtgttttgagaatctacgttcacctcaatgaacggagagccgctggcgaactcaatatacaagtactcccgctcagtcttgcgaatgagcagcaccgtagtgtccgccgttaaggctgtgttcagcctgatattagtagagctggtccaggtgtacccagtggtttcctctccgtctaggtatacatgaatataggacttgtccaaatactcaatatcgcactggatatcctgggtaccagctggcttgatttgttcttgccagctgaacgccatattaatcgtctccgaagttattgatgatagctcgcgtaggtgcgaattcctggattaacggtacctgcttagtgaaggtcttgatgtccatattaccagtagccaggtcctgtacggccccgagcagccctgtgacataacccatagacgccaacgagtggcggggagaatcccccaggaagatatcctgcagtaaggataccccgccgatggcactcatacccgttacggactcactgatgagtttctgggtgtctacgtccttcccatccatgccatgcttagccatagtagccagcagcatcaacgggaactggtatgccataatgtgggctacaccaatccacccagcatcgttcagctctctacgcagaatcttgttagtggcagccagtgcgaagctctggtaccctacgatgactttgccgatagggttgaactgtgcaaagtgtgaggtctctccagtacgaatctgctgtaccaggtagtccatcatacgcgcccctacaacctcaacttgcatctgcaggtccggctggaacatggcgcccgggttagccttattggcagcgatagcgcggtccgcaacatctcgggtaagcccgaaacgctccagacgcttaaacgcctcagcatcacccttgaacatctgcgtaagctcgtccgccacaataccggagttcaggttaacctgcagccgatgcaccatgctcataccgttgacgtggcgtgcagcctgcccaacgttctgagtgacgttgaaccaggaggcctgacgggtcaggtccaggttatcgtcagcgtacgtattcagccagcggaagcgcatctccttctggatatttcccctcagcacagtgtctaggcgggcagccatatccggagtcttgatagctacggcaccttccttgaaccaaggttggtctcgcatactgcgcagcacacgggccataccaaactccttcatagccaacgcagtgtcggtcagctgatacaggccggagttcttgagcatagtggcgttagccatgttcccggctgcgcgcagcaagtccggaagctgcccagcgtcagcaggtgccccacccaggataaagtcgatggtgtcattgacggtcttctcccacttagcagaatctgccagtacgtgcttggactcgtcaatcatcttagcgagctgccccaggtcctgtacgcctgcataggccataccgacacgcccagacatacggttagtgtacccgtgcataaccttggctacgtcagtatccatcaggtcctgcatacgcatgctctttccgttaatcaggtactctttgtccatgttgaaccgagtacgctgacgcaggttccgcgcaggggatgtgctgcctgattctcgtacgttaccagccaggaagctctggattgcagactcttctacaccagcgctgcgcatagccatgacgacctcatcgttacccatgccgttaatcagctgcttccacatagggccagactgtcccgcacggccgttgtagataccgtcaaccatctccttggcaacacgctgcactacctctgactccatgctagggtacacgtcccgcagggcggcccggaacagggctcggtagtcgtccagagtgttaccctgcgcgataccttggcgcatcttgtcgtagctgtactggcgcgggaagtagtagtcggatttaaccaacgcaccatcatccactagaccggcattgagcatatgctcgtgccacttgctagcccagccagagcggcggtaagcatcaaccagcggagcaatctctgcatccggcaccggcacagcgcggccgtttacgtcagcactgtaggcagcatccaggtacttgctcaggcggtcctccagcgcagcccgctcagcgcggaaattactccgatggaagaagcgtgagagcacccctacacccttatccttcaacgcgcctaggatagcatcttcaactacgctggcgcgggcatccatctccaaagtgaggttacgcttgtagtctaccactgacgggcgacggccgcctactgcagacgcatccgacactagcagtttagccaagtcttcgttgccttgggcgatattatcgtacagtgcaaacatagtggagagcttcttcttagcgccgtccagcatagcttgtgcacgcttagcctcgttgagggtagtgctgcccgccaggtcctggaaagcctcactacggaagctctgggcttggtctgcataatccttagctgtccacttaactgcatcctcatacgcatccagtacatcctccaaggcagagcctttggccttgatgcccagagcgttcatgatgtactcacccagttggcggagcatgctattgccggtgggagactgcgtacgtgccaggtgctcaacccactcagggctgtcgcctaagcctgccagcatctcgtgcacattacttgcgtaatatcgcatacgcggtgtcagggtggaatcagccgcaataacagcgcgcacttcctccaggcgtttagcaatctcgggattactgtcaatagcgcgcgcagtagcggcatgaatcagttcgtgcacggccaccttgcttgtatctgcatccatagcgcgcagcgcatcaccgactgtagtccaggtgctgccgttagcttgcttaggcgcgcgcagggatatctctccccgcttagctaaatcttgttgtgcataagtgtagcggctgcggtttgcggagcctgctactagtttaaaatcaatgtcatttacagcatcgcccagcgtgtccagaatagccttctgtcctgctgtcaagtgctcagacttcctcaagaactgaactacgtgctgtgctttcatgttcacggaggcggtattgtttctcgatacttggatgctttcatccagtgtcttagtgagaatttcctctccctctcctactccggtaacattagcatccctagctgtacgagttgtaggcgcttctgggtcgaacataggctcacgcccagtacgagccttggcggcagctttagcagccctagacatatcccagagctggtctaacccagctacgcccgctatcagtgcagttaccgcagcagactgccccagttggtcctgtgcatagaatgcagtacctacatcagcagcgcgtatagcggtacgtgcagctaagcccgcacggccagcaataccagcagcagacatcggggccaggatgaacggggaatcccctaccaacatacccgcgaacccagctactgtgttgtcagccattaagcggtcacggtcacgctgctcaagcatctgctgcatgcggtagttgtaatcttctactgacacggagtcatgcaggtactcaatctcttcctgatttggggcgtacagcttagcccgagtatcgctactcagggtctgcttggcattaaagttcgggtctcggtcaaatgccggggcagaggccttgcgtatagctgcggcgatgatgctgttgcccatacccgaggcaaagctctctgcggctgtagtagctggggtcttggcctgtgccagtaatgaggcacgccccagtgcgttcagaccgttgtccccggcatcgttccaatctacgcgctcaggcgcagatttaagtgttgcgcccttagcagaatccttttcctgtggattcggttcttggttcagaaactgagccataatatctcctaaaagaattttgataaggggaggccccgaagggcctctggttagtgcgttgcttcgaagagccaatcacgtaggttttgttccaggtacttcttacgcccaggttgggcctgcttgtacgccggggtattccgcagcgcttgccaagccctaccctgggcctcagatacagggtactgatacgcccccaccggggacttagcagccttgcgtacctgtgccatcgcctctgctacggggccggagctaccgttaccaccgtgatagttcaggtccaccataacctttaacgcctcgtcggaggcagtcaaaccctgtcccttgagttgcttctgcacgttcggtatgtactgctcctccagtgaggatttgaggatactgataccgtcgtcaatggtaactttctgggggacgggcatgccagagttaacgtgcaggccgaagcctacgctacccttacccttgccttctcggaacccttcgaacttcatagtagtggctaggatgtcactaaacagtgatggttccagccctaccgagttacggccatttacttgtacgctgacggcacgcccgttgtcgtggtcgtagaaggtggcaggacgtacacctacttgctcgcttccaatcttcatctctccagccagtgctgagtcatacgcagcctgcgcagtcgtctgaacgtctcgaaggttcacagacatcgtctggaaggtgcccttcttgtcgaacacggttacggtcatgttctgacctgcgttgccagcggtggcggcctgcactactacacgctctatgttgctggggtctgacatatactgaacctggttctgtatatgctgctgcagggaggccttgaactgctcttggtcgcccttataatcacccatgatagattgcatagaggtgccagcgggcagatacacatgcctaggtgccccggcaatgtccagctccagcttacgggattggatattgccttttagcatcgtattgatgtcgtcagcgtccttccctacaagggattccggattgtggttatacacataacggtactcatcttccatagcagctcgcgcttcctggcgctgtgcgtctgcatccccgaagaagctgaaccagttagccgtgccgcttgggtctaccatcttgtccgtggggttactttggatattgctgtagcgcccactcgccttattacgagcctggcggcgaagatcgtccaagatagtgttactggcattatttgggttttgcgtaacagctttctgcaccactccacgccactcagatgggacctcagacagcagcgccatcttccctaagtccgtactggtgctataagcctgtgcccacaagttgatgctattgacgttctcgcgggaaacctcgccatcttcaccgagctggtccagcgtagtcagcgtacgtgccatatccgaagacatacgcttgtgcgcctcgtttacggcccacgcatccttgctgttgcttccgtatgccagcagctgcaggttcccttcgggggtatccggaaagctcttgagcagctgagtacgtgccttatctaagtcccctttgaacatgcccgccagagtagagcttggcatattcccagtaattgctgtgcgcaatgcttgggcgtctgctgccttctctcgaatggtctgggctttgttccagaactccatgctggtcccggcgctaagtacatcagatgccgacagctcaatgacacgactacgaatacgctgcatagtctgttcttgctgctcaggtgtctgcccctcaagagactgtattgcatcagagatttcgaaacgggcctgtgtctcaatctgagcacctgcgcgcttgaactcctgatacagtgccgcgttgacatccacggagttgacgccgagttccttggtggccatttcctgcagctggttaattaccagtgggtcctgcgtctgctgcgctacgctaaccagatactgcttggctctgtccagcttcttgttcttgtccaagtgctcggcagccaggatactgtctaatccggtcttgatagacatctgcgcggcggcaccctgtcctgcctgcagacgctgatagaactcatcgctggacgcactcagtccacggtctagggcacggtcagcctgggccagggcgaacgcagcacgtcctttctggaaggctgtatagttagccatgctggtagcgcggagctgctgcagtatactcgtagcagactgcttggacatatccgggagatacaccccgagcttgtctgccattgactgtacgtgctcttgctcctgctgctggaattcctcgtcagtcagccctgcctcggcagctttcttagcccgggctatgctgtctgtgcgccacttagctagagtgtcgtacgctgcggcggatacgtagccgtcctgataggcttcgcgcacgaagatgttttgcttctgtacagcctcgtccttggaggccattgcatctactgcgccctgagcatccatagcgccgcgcacggtggcggctgcggcgttttcttttactgccgcgtcgaaacctacgccgaagtcctgcacgaatccagacagggcggctaggcgttttgctttggaggtatcaacagatacttcacttaccgttgacggcaagctaacatcgttggattgcagttgcacgccaccgatatttaacccctgtctactgggttgaatcacaggcatttagtattcctcctaatttaccaggtgtgaactgggctattgcccttactcccccataagtcataggaggatgccatgctctgcgtagctgacgctccgctaccaggcgaagagctaccagagtcagtagacgacgcagcgttaccagcgtactgcccaacggcagatgccccgacactcaacaacgagttaaacatgttatcgtaggggtcctccatgtccatgttagccaggccgctatccacggccttatctgtcattagacggaagccctcttcctgagttgcctgctggtcacgcacgctggcctcttgccgcccggctacagtgttcaccgtggctactgcgtctttaacagaggctcccatagtgccggaagctgctgcctgcagtcctacttggctctgtgcctgcagcttctgctgctgaatgttaaacagagacacctcagtccggtccctggactgggcgcgctgtagcgcgatgtcgtttagctgtttggctgtctgttgaatcacagccttgttcctggccttggacacttcaatctgagcaccctgccccagaacggtcttagcggccatggccgcaaccatccaccacatattaaatcctccgtctgcgttggttgtagcgcaggatgtacgatatatccaacacgttcagttccatagaaccgtcagtaaatagtgacacctcggttgtgtctgcgttagtgcggcatggtacggtaatcgtagccaggtccatacgcagggcctgcccaagcgtcagctcctttgagttcatcaagataccagtcagttccccaccccaattgacgtcccgcggggtgtctagtacctgtacgtcgaagtgcccggagttacgtactgccacgtccaggcgcagcaggcgcacatgcccacttccctcgagcttgtcattctggtcccgtagaataggcgtagttagcgtgaacgtactacggtaacgtctcccgattacataagtgccatcaggtacaccgcgcacaacccgtagggtgttctccccagcaatctccttgatgccaacctcagtaggccccatagggttgctgggtaggtacgttaggataagctcttccttgtagttgtccgcccacccaaccgggcgcaataccgacgggacagtgaacaccccgtcctgcacttgaacttgcttctgcaaatccgagtaggcttcgcggtactctgagcccagctgataaccttcgcgcgggtccatagacacaatcaaaagcttgttgctgggactgggcccttgcatgtacaagaacacctcatcctccagcgcctgtacgctcaggattgggtacgggaacgaccacttatgccacgccgcctgcatcttagcgccgtcacttccgccccacatgaactcgtagaccagcaggctgttacgctctccagacatgcgcgagaaggccatattggtgacgctggagttttgcatctgcaacaccctaccggggatataccgaggtaggtgcaccgtggcatcctgcgtagtgtactgtgccgcggtgtaaggtgatgggattagctccaatatacccgcgtagctgtcgttgcgcttgttcgggtagattactgtctgccccgccattaccggagtcacacggctgtcacaatcgtaggtgctggtaatactaatgcttgcgttagttggcgtaagtactgccgaacccggcacaaccgcctgcatgctgttagcaaataggaccaagtcccggttgaactgcacagcggtgcggtacacagaatcctgggcagacgcagagctaatgctgatacggtccgtatccagcagtgacgtcacagtagagcggtagaatcgctgatacaggcccgaggcggacatatccacagagctaccactaagcaggaccaggcggccctggaaagctgcaataccagtgatgtagccattctcgacgaatcctggattactgttgttatcgtcgttaccagctaagcgcccctcccaatcccgcgcaatgatgttgtcatccgcggcgagctctctgggcatgttcgtaatcttggtgatgctatcgtacgcccccacctcggaccaggtgcgggtgctgtagctgaactgataccacgccgtctcagacgaggctgtacctacacggcacattgccccgtcagcttgcgccgggagctgtgcaggaaggtcctgctcctggtctacacgtgactggttggataccacggcataagtatcacccgcgtcagaggataccacgcagttgctcaacccgtagaagaacaggtacgcaccacgtacgctcacgttcccggagggcagcccgttcgctacaagagagtcccgcagctgctgggcaacgtaggcacctgatacctcctcagcgttaccgctcgtgctgccagcagccggtgcggtgtagtccccagtgtagtccacccccgcagaggtaacggtgacgttccagcgtttctggaatgctgcggatttaacgtagaagaacccggtggtgctggggtcgatgcgcccagtattgtccacggttgtgttcggggccatctccgtattcaggatataagtcagcccggcaatgcttgcggtctgcaaagaggtctggcctacggtggtaacaaagtacgggtcattgccggaattaaggatggtctttccattcttagccagcaaccaccagttaccgttgctggtgttaatcagcaggtgcctaccgtcagtcccacgctctacgtattcagtgaacagggaatcaagcccagggctatcgattgtgctttcccagacaatctcacccggcggcctacggcggatacctgaaaccgggtcgctgagcatattcagctgcgcccccagttgcccgggctggcgctctcttggaacctgctgggagacgccctgcagcaggctctgaatggtaccctctagggactgggccatatactctccttaaaccataaaacgagcacggcggattctgcgtgcaaagcgggtcttgctggtgctgaacttctgattgcgcagatgctcgcgcagcaccatgctcttgtaccgctcagcttcctgtgcgtaattagcgtagttgctgtcgccacccaggtcgtttaagtatacctgcgcagtggtgtagttagccacccacatagcggcgtgctccggcaggtcctcaaaggccaaatccaggaccacacgaatacgcacaggtgcatcgaagtattggttctgctctaccaggtcgtatagattcccgtcacgtaccccgtacttggattctgagcaggcgtcatatacagccagctggttccatggcaccttaatcaggccgtcggtggtgggcgtaacttcacgctctaccacgttaaaccagaatcccgtgctgagtaacccacgacggttacgtgcgagtgcagagcgagctaatccagcgctagggttactagtgttgatgtccataacgcgagactccccaagggcttccagcgtcaggttaacagcgtctaattctctcatatttgttcctctattaaagaccccttggacctttaagacagggacaaaaaaaaaaaagcccctggcacccgaaggcaccaggggcgcgtattactcttccgcagtatcagcggctacgtcagccgccttacgggttttcttggtagccttgcggccagattcaaccgaagccacctggatgttcttagctacatcggtggcggccttaaccgcctcccgctgagctgcattggcctggagagtctccagaccgaacgtagcgattactgccattgaacctccaattaggacttggtggtgaaggtgaacttggtcactgcagcggtgtccggacgacgcaggccgatgttgtacatcgcgtagcagtccagcacgttgctgaactcacgctcatcgtcccagatacgggaggtgaacggcttagcctcaacagtcaccagggtcttggacttgctgaaagtcaccatgcggcacagcgcatcgtcagaggtgacggtgtaggcgctacccagcgggtgcgtaccggcctcggttgggaactcggtgcactcaaccacaggcacgccgttcatcttaactacacggcggtctttgtaaccgtcgttgttggatgcgccaaattccaggttcaggagcttcggatgctccagcagacgcgaataggtatcgacatccaccagggtaatcatgtccgacagcggggtcttgcgcttgatgagttcatcaataccagccttgtgggccaggttgatgttcatggcgttagcctccatctcagcctgggtcagctgtgtggcggtagtggtgccaggaaccaggatagcagcgcccacctcaataccgtcgttgaacgccggtttcaggtgcgccggagcaacccaggaacggcccttgattagctgaatcaggtgcgcctggtcgaatgtctctgcgaactcggagccgttgttctggcccatctcggtcaggaagtccggaccggtccagtcgtcctggtagtcaatcgggttacggatatacagcaccgtatccaccacgataatcatcttatcgttacggaccggggtgctatccagcgcctcaccagagcgacgacccttcaccgaggaggtgttcaggcggtcaatacggtaggtgttggaaccgctgatagagcgctggctggagaggcccaggaacagagcctggtactggaagcgggtatccacttcgttctggtacacttccaggtgaatatctacgtcagacgccgcgccgccccagtgggcccgggtcaggttgccattataaatagtgttggccatgctttagtttcctttataaataaaattaaagacctacgcgcttaccagcttcacggcgtgcgagcaaatcgttataacgttgactgaactgtggagacgccaagctacggttgcccgcttcctgacggagtttggtatattctgcgcggaattccgcagcagatagtgcattgttgctggctacaccgcgtaccattgggttctgtgtcttgataagacccatatcccggcagaagcttgccaccaactcagcggcctgcttgagctcacccgagttagcgagtgcacgagccgcgttacgaagaggttcaggggccttggaattaaacagctgcgctgctacctcccagttctccttaccgcccacgatatcgtaagcttcctgtactgccttggtggcttgaccaacctggtcttccaggtacgctttagccagcaactctgcataagcagcgtgctctccgaaacgttccttaatgaaggccgtatcgattaggttagggtcctgatactccagggccttaccaagtgcccgcaccatatcagagtcagttaacccagagactttctgcaacatagctacaccggcgtcaatcgtcgggttgcctgtcttagccagctcctggggctgctctttagcgctatcgccacccttatccagggccgcttttagggcttcgatatccagaggaatcttagcagggtcaggggaatctttgccctgttgctgctgggtaggggtctgtgcatcctgcacgccttgattgttcggggcgctaaggggagcacctaggcccggaatcttagggccgccttggttctctacctgtgtagtttctacgttctgaccgttttctacgttatccatctatgcctctgttgttaacttggtaataagcccagctgcttacctgctactgtcgggtctgctgctgtcaagccctggagttggtcctgtgctagacctgcggacgtatcggcagacgcatcctgaacctgttgcttctgctgcagctgctcttcggtgtacatgaacggctcgctaacgataccgtaggcgtcgaagtaccaatctacgcacgcatctttgttgaagcgcggagtaatctgctcaagcaccgggatagccagctgcatggattgcgccgcctctaacagcttgtccgctgccgcggctttagcgagtgcagaggtgcccaccgtaacgttgatgctcactacaccttcgctgaggtacagcttaaagcgaggatacaccagtgcggtgtacaggtacgccagcttacgcagccatgtgtcgctcagaatactgaacccgccgcccatagcggcttccgcctccttggcattctggcgaatctcgtaggccgtgacgcgctcgccctgccgggagttaccggtgtacatgaacgcacgtgacagtttctgttcgagcatctggatgttgctggcaatccactgaatcttctgggcagagccgccctcgtaagcagtgacgggggatttgctgttcccgttggaaccgccaccacccacctgcacagcctcacccgtctccgacgttgagaactcgtccacgtctaacccagagcttgcgtcaatcagcgggattaacctcgcagactcaacctcgtagttagtcaacgcttccgacagtactgataatcgggcgaagtccccggcgtagtcctctaccaagccgcgcccatagtgttcgccgctaacaaggttccacaccagcacgttgtaaggaagctccagctctggataggtgctgctgtctccgatacggtgcccgtctgcttcttggtacacctcgtagcttactacttctacgccttcctctgtccgcttaaccttgcgacaagcggcagtgtagatatcaacgtcgccgtatgggtctttgtcacggtagaaggtgccgcggaaatcttctggcaggtcctggacgcttgcgcgctctctgataatgagtcgcaggacgttcccgctgccatcccttcgaacggtaaagttacggactgagtagacgatggatttacctgtccgctcatcaatatactccaacgcgttacctgtaaccagcagcagcttcacagcttgcaacttcgcagcataaccgtctttctcaaatactttctgtgacgccgtgttctcgacctcggccagcttagattctgctgtagctgcgctgcccagcgaactaatgaactcgtccaggtccgaactcttggagaaccggaagaagctggtgccctgtgggaacagggcccctacaatcttagtggctgcagtgttgaccagctgcgcgccggtgctctgatagtctcgctccagcggcctgcgtctaccgtccagggaatcgtcccgggtaaagatcgtgctgagcgtccactgcgcgaacttctcagaggcatccaagacgcccgcgtcctggtccttcttaaagagttctgctaatgttgctttttgttccaagctacccccttacaggcccagaggattgctctgccctgcttgtcgccgtttcttctgctcagacgtaattgcatctgcagatgcagaggcagcccctgcggggtcaatctcagcaatgttatctgcggcgctattagcctctaaggcagcctgttgtttagctgcgctggcctgttgctctgccaagcgctgctgcgcctctaatcctgcgttgtcagtaaggccgagcatatccgtggccttgcctaacagtttacctaaaccaccactcattctgacctcactaaatgataagttgttttgtacgtgttactagacgtgctccggctaatggcgatacgcccagcgcgcatgcacttggctattgcgtgcaggccctgcataatcacagacactgccgcgccgttgtccggtttcaatacgaagaagtctgtatatagcacaggctctacgtaatgacagtcctctacagcctctgggtagtagctgacggcaccgactaagtcgccttgggagtcatagactcctagtatatactgtttacccagtatacttcccaacaccctccagtagtgctgctcaggagccaggccccgactaatgccgtggcccagttcgtgcagttgcttcactgcgtctgtaatatcgtcagacttatacagaaccttgagagtgtaatcggaagttttaccagtgtgttttaacttcattcctactccggtaacattaaattttagtagggtacccaaactggtataccggcctttctacataactcaaccataccagcggtaccccttccaccaggaaaggcgacgcagtattctggaaaggccaaggatatcatggcggcgttcctgcgcatacctgcagatttaccctgcacatcccacagggcaggcatacgcagaacaaaaataccggattccagggcccacctgtctgccagtgcgtccgcccctctggcatttccatgtatcactacagatggtttgtttggcagcatatccattgcggtctttagtgctaagtagtctgtgtaatctcgcccaccagttactagtactcgcataccataccctcagcagaagaagaaaggtgattccagtacctgccggatgtccagagtaccaacctctggcatatccaggtccgtcaagtccgcaccagctgctgccgccgcgcgggtgatatccccaagaaggtcatgctcttcgtagagacgcacaaactgctcgcggatgtgccggtgcatagtatcaacatcggctgcgtgtgtagccagggagtcgtgaatcggcacaatgtccagaccctcggcggcacatagaaccatcatcaagtgcgtactatccaggctgtgcacaaagttcggggcaatccccgaggctgccttgcgcttgttacaggtcttgaaatcccgattatgcacgcgcatgattgtgaggttcatacagtcaattcgtacccgcacttcttcacgctgtgtgtagcggttcattacgagcccgcccagcggcgtataccactgcaggtgctggcttgccggtacacgcctagcgaggttctgcaagtacgacataactgccgcagcagcagggtttgcctcctctatagcggcgcgcatacgcggggctaggtagcacgacagattccatagactgttagtgtcggtaccttcatacccctcagcgcaagcgccttcaaagatgtagtcactgcagctgcgcaccgtggcgctgtagaagtaggtcatactggggcgcttggtcatgctgcgggtgatttcgttctctctccagtaagtgctctggataacgaaatcctccttgtccaggtccagtatcaccttctcgtccgtacggcgcttcacatccatatacaggtccgctttcttgtcgttaccctcccagtacaggttcgtcagacgaccgcccacagggtctctcaggagcgctgagaggtgctgcccacctgagttcgtagcgtccatagctactgggattcggctaatatactcttctgggcatccagaacgaatagcattaaccaggtcgatagcggcggccaagaaacaccagggggagtccgccttggcaaaagcagggcaatcaaacggagagattgtgagttgctcaatctctgcaaagttcgcatcagcccaagctgcacggtcttcggatagggttttgtcataaccaaagcatgtagcgacgtgcactttgagccaaaataggccacgctcccccagcggcttaccacgtccgaattcaagtagggctttctgcaaatcagaaccttgggggtgcagcgaggacttgaagtacaggcggtagcgccagtccacacaagtcgggaagtacagggctttctcatctttgaattcctctgccatctccaacgtagtcagaaggctgcgtagttgcgatacgcgcttacggtcagcactgtaccacagggacatacgcgtcttccactcaccgaagcggtcaagctcttcctctgtgtagttctctttaggaaccccgtccagataccactccggtttaggctccggtactgagcgaggcatacctatcccaacacccagggcccgtgcttcttgcaccagttccagtatgcgcttattaatacggtacggggtttcctgtgccttattaagcgcctttttgatgccatccgcggatttaaatgcttccgctacttcacggagacgtgcgcggtcgatatgagaattatgataggtgccgcgattgtcgataggggtgagatatccaccatcccacagagtagtgtgctgcaccggcggtaccagcataggtggcttcatggttacggtatcagcggactctaccagtttctggaaggcctccataacgtcgtcagccggatagagcatgctcagattcccgctacagttcttccactggaacagtcccgtctcaaacactgcggcacacagcagacgccctacggagatgttctgggcattggtccaaggctcgtgcccatagtgtacgttctcggcactggcacggagcgtacgcaggatgtgcgtaggggacttcgtacggcgctctgtgagatactcatatactcggtccatgtacgctggggctacgttgcgtaactgcagagccagtagctctgactgtacgtttctgcccagtgcggacattaccgcctgtgcagtctgacggcgactggcggactcgccaggggcgacgctgaacgcctcaaacattgtgcacaggctcagggtggtcaggacatccaaggggattaagcgcaggaaccgacggtacttcccaccaatgcctggggctttgacatttcgcatctcatcgatagctgcagcagccacctcatatgcagaggtgagcatacgctgcgtcatcggcaggttcataatcccaccattctgcaatgcgtccgtaatcagcttacgtgcccgctcgattccgcgaatcttataggtctcttcaagctccagctggcgtttcaccagtgcttcctctggtactacaaccgtattcagggcgctaatcataggcgcttagtctccttggttatgtccggtacttctaactactgattgcggctgacccagagattatacatctccaggtagtctttagcggagctttcgtcgccccgctctactgctttctgccacatcccgtggcaccactcactcggccgcactatccatctgctccagttctagaataaataatgcacaacaagcggcatgcgccaggtgcggcaacccgctctccgagtccagtgtttcccccagagcatgtgccgtgaggtgccgcagtagcgcggccttgtatcgggacttaccttcggctaccgtgtgccaactgtgtgccgcatacttctgggccccgaaggtcagcacatcactgatacgcagcaacgcattcgggcacccgtccagtagcaagtccattcgaggtttgtctgcgtcatacttcatgcctgtacctactgcactcatgctaattcctccaccccgtgggattttaagtctgttcgatgtgctgctgcaccatagtcgcatacagcgtaagtggtaatacccagtccgcggaaatgctcaatcaccgcggggctgtcatcccaagccgccacaatgttttctaaccccacttggttgcgcaggaactcctctttgataatgacatcctttcggttgtcactgtgcggcctcataaccagctcggagtacataacgaagttccgctccagccaggcctctgtttccgctcgtactatatcagagcgccccgtcaagataataactcgcaaccctgctcgcaccatgatgttgcacacttcaatagtgctgtggatagggctatcatacttcgaggcccggttgaactcattccaactgtcagtcagatacaaatccacagtaggcagcaagtgcaagcggtgcgcgccatcagctagtgtaccgtccaaatcaaagattactgtcttcatttaatagcccctccccgtgctttttgtcgcgccgctctactaccctctgccacatctcatgacaccatgcactaagcgtcaatgcacttacctcggtgttgctcatacagttctgggtacttatcggacttagcaatgtcctgctccagtgtatccttgttaccggcgcagagtctgtattttaatctgttaccgagacaatagccgtagaactgctcttgcgtcatgctgcgtgcaattacctctattgcctccaggtccgggaagaactggtagtgccgaggagagttcactgagtcagaaacagcctcgctcttcgaatggaagagctggaagaactccgctcgccaagaggtcccacactcggctaaggttataagtccgtcttctgcgcacgtcactaatctgggggagtctaggtctacctgtagctgttcacagatgtccttccagataccccctacgtgactcgctttgcgcacaaccaaatcacctgcatagaatttagtggattcaatcatttaacagtctcccgtgctttgcgtcgtgccctggccttgcgggccttgagcttctgtgcttgtgctagttcttccggcgtcttgtgcgtatagtatagcatatccgtaggttctcggtctaagtaatcggcgaccctacgtagagattcagcaatagccccagaagattgcatgctaccaacaatccagcgcccagcggcagatgccactttgccttcccctccattgcacgagcgatgaagagcaccccgaatacgcccagtaatatgacagtggtcaacgacaacagaatcaccagttacccccttgattgtgaagtccaaaggtttgccgcagaggaggcatatacctccctggtctttggcaagcttaatagccacagagcgaatctgtgctcgagttattttacgcagcgccatgaaatccctcttaacatacgatataccgtactttgagccatacccaggcgtctagctatagcgttgctaccccattcccggtccccaggaatgtgcatttgccgcagatagcgcaccgtaccttcgttcaaacgtgagcggccgctgctggaaccctttgctgatttgcttttgtgggtccctccatgcaggtgctcagggttaatgcagcgagaatttccacaggtgtgctgtactacttcgggccactctcctgtgtgttcatagtacgccttcctgtgtgcggttgtaggttggcgtttaccgtcaataagcacccacgcggataggaacccagtctttggccgcccctttctcccatggtctatacaaggtgtactcattaccatacctcaatccccccaactacatccagcatagcattgtcgtgaatgagagaatccaaatgctcaaccgttcttcgatgtgttttgggtgctcgttcacgcagcgcatccagaatagtttcaagttcatcgtgtttcccctcgtagtataactcaatcgcccgcaggctcatttccttcgcagacatcttcgccattgtctgggtgctcctgtatccactgtatatgctgtttatggtactcgtgcagcgaatgcacccagtcacgcagactgggagtagtcaacagtgacatcagatactgataggcagaatctgacggggagcgccgcaggaacaggcattctgcctctgcgagtacgtcttggttgtttcgagcgtaagccgctacgacgaattctgcggcgtcctgctctgaggtaatagggtagatagcatcaaaggccgttcgcttgccacagggcttcccatcaagcaacgtgatgcctttgacgttatctgcgtcgtcccctgctagcatctgccaccagaagaacttcaacccgtgtgctcgtacaggcatagcctgggtgtcatcccacttaacccatccgaatgggtcctccagtgcaggccacactgtacctgtcggtatatcgaaccgagccatagggccgagccaagaatccttgtcctgggacatcaggattccccggtctccgaagctgtacgaatccattacaaagaggtcgtcggcctcgaagtagtcactgctgactacctgaataccctgctcagaatactggtctgggttctcaatcaggtgccgcttcaacggtgccttgagcggtagctcctgtcgattagcgcgctgcccctgatagggcttagccgtaggcaggtgccagcgcaagcacttagcacatcccgcaggcgtcaggtacgccactgcctctgagcagccgaccaggaacatatcctcaagcaccagctgatagaagcggcgtattgcggtatccaaacgttttactgtagcggcggctttgtacacgcaaaaatccgcatcgtacagcagaatcttcccagagttctgcggagctaactgctcgctaagctgggacaagtcaaccccgttgataatcatcagcgccccgtaatatcgcgggccttcttgtcggcccagttaacccaacgttctgcccactttgccttgctcagcttatcgccaaggtagcacagtcccgccaatggaatcagcgggagaatcaaagctacgtaaattgcgcgagatacgtacaacatacttaagcctccagttcagacagcaccagcacggtgccgagcatgtccccgattacttccggagtacgcaggctctggtctacgtcgtagatacaggagccaatctccgccaggccaacgctgagcgtgcccactacgcggataagtacaaggtcgtctcctcgtaacttatcggcatgtgccgccagatcgttgtgctcccggaaggctgtagcggccaggtccaggtccattccgtacagggccgccagctcatctagtgcgttgtagatgtcgtccagactaatattaagcaccccatacgccgctgcatcgtataccgctgagccgaccgtaatggcaaggttctcgtacgcttctaatactttatccattagtcaaatcctttcagtttgtgtttttgaatgaaggcgtaggctttggtctcagtggccgtggcctctgcgcccagggcatatgcacggcgccgggacttggcgcactggcgattcaagtgataacgctgcgcactaatctcgggacccagaaggcttgccctgtatgcgtgagagttagctgcccagcgccagtcgtctgctcgcttctgcaaacgctgtgcgcgcagaagcagaaacacagcgtactgttctttggcccatgtgattatgcgcatttatacccccaggaagttagctacttcgtcacgcttggcacgcaggttatcagcatgacaagcatgcgcttctgctacctctttgctgtgcttggaggcctctactcgcgcctcggattgagcggccagacgtactgcgtcgtctgcgaatttaactgacagctgctcgttaaactgcgctttggcatctgctcgtttagcttctgctgtgtaggctgcactcaggagtttgataaggatgttgatgatgttcataggcttcctctaaggccccaggaggggccgtattagtttcgattagggtttattaggcttgaggtgcagcgggcgctgctggagctacaggcgctacaggagccgcaggagccactggagcagctggggctgccggcgcagcgggagccgccggtgcagaaggagcagcaggtgcctgcatagctgccggactcggaacagagccagcgttcagcataatatccagagcactgcccgggaagtctacggccttgtacatatcctcctgaatccagttcttgctcttaccgtcgtcgaaggtgccttcgatgtgtaggctgtcccaggtctctttggttgggttgttccacaggaacagcttaatctcggaggcatccagcgctggcatcttaataggttcaccggtgttcgggtcgaacttaggaatcgggcggataccggacaggtccacgatgttcgacttcttacccgcggcgctggtgtgctcatcaatcgggaaggtgaaggcctggcccagacgctgcgctgcatgcttaatgctattgtcgtagttgagcttgtcgaagaacttcttgaagcctgctcgctcaaagttactgatagccatcgggtacgggcggatacgcttcacttcgccgttggggccgaacactacaatgccgatacgtacgttagccactgcaggcttaccggtaggcttaccacccttggtcggcaggcgcttaccgatttccacatactcggtgaagtaaccgtaatattcacccttcggcagcagcacgtcctcgtacgcaccaccctgtgcggtttcccgcatatccacatcttgggtttcgattgctgcgtctaccagagcgttcagggatgccagtacattcgtagtcatataattacgtcctcgtttagtttaaatgatatttacgtgcagatgcaggtccggcctagcgattcttaagtgcggatttaatgcctgcagccgcggctgctgccacaccgcctgccgccaggattgccaacagcaaagctacaccgccgtagaacggaagcagtacccaccaccaggaccaggcgataacgccagtcagtttcagggttacaaagataaggcccagtacagaacagattcccattttcatcgacactcctaattaggttttgattatgtcaccaacttttaaactaagagctgaggcttcatctttataccaccgctctgtctcagatttgtgcccccagcagtcatactccagggttacacgatacacctggtattgctcatcccatacaggagcatctactcgggtgacagttgaatccagtacattcatttgcttctccctacccaacgaccatcgtcgtcgagcagcatcggaattaactgcgggcaaccctcggtgattaccatcacacccaggattggtttcttgcgggtgagtctgccataagcaaaggccatgctcttgcggtcaatcaagcaccctgcatacgcaccaaagtacagcgccgttgaagaagcagcatactgaacctcgaagcgtccatgctcatgccccaacaccagagaggtgcgctcatgggatgcattgcgcatgaaatcaccgctgacttgatgctggaaacggacaggccccagcggtgtgttgagcacccaagcgtcggcccacgaccacgccggagcaccatgctcagggaataagatgtcccggtacttcttgataaattgcactggcaaaccgtgagctttagcgcggcgatatacgagtgagccgtgattggaatcgcaaaccagcaggttcgggaatagttcatgcagctcctccagtacgagcttggctttctccagctccacccctgcgctatccaggttagggtcagagtcgtggaagctgatagcgtgcccgtcggtttcgtcacccacctgcactaccatgtccgggcagtacgcatcacgtacgctctcaaggaacggcattgcgtctacgtgggtatacggagcgtgcaggtccccgacaaccagaatgcggtggcacatatccggcacctttgtattcccgatatcgtccgttgggcttggttggattagcttacgcgcctcctgcagcccgcggttggcactggccttgctgcccttgttatccatgaagatgctgcgccagtagcgtacaagctggcgagacacgattacgtcccccctgcgaaatttgttattgtacgcaatagctgcatcagtgttatttaggaaactgccaagaatttgttggtgctcttctttggtccacagtttgattagacttactttagccaaggttgcctctcttgtgttgttcctactcgtatcacattaattctcggggaatcacagaatcaagccagagtcaacaaataattttatttaattatttagttgaccctagcatatttccatgctaccctaaccccctacaccacccaagggtccacctatcactactccgcgatgagcttgtactctccagcgaagaaggtgatgccgtccccaggcttctctgagttgctgtccggattgagtagctccacctcgccgaattcaacgtcgtaagatatcacgcgatgctgcgtacccggtgcaaagtaggcacgatgtcgtgggtcgataggctccggcccaagttccagcatctccacaatactgccaggtttaatattcattctaccttctccttactgtacatgctcgtacccatttcagcttccgccgggaagggcacctcgccaatgataccgtagttaggccagagctggtggatacgcttaggtgcatcctccatgcactgcttaaccagcaggctcgcctcacgtccaacctccgggttggcgctgtccagatacaatgcatcgtgtacgttcgtaatcaggcacacctgattgtcgaaccagtcacgggccaagagtgcacgcagaaccataccagccgccaccgccatcaggaagaatgcttccccttggcaccagtagttcgccatctcggtttccttgtagtccatgaccttctgcttacgctgcccaggcacaacctccttccactgctctttctgacggaagctgtagcgggcaccagcagggctggtccacgtcccaatgcggtagattcgatagctgccgtcgtccgcctgctcccggtacatgcgaccctccgcaccggtacgctctacctcttccttaacaacagcgcggaagccaattgtttgcgggaacagcgcagcctcgttgtccaagaaagcctgtgcaaattccaccgtacatccagtagcaaacgcaatccccttagccgtagcgccatactgggctgcaaagctaggagccttaatacttgtacgcattgccttccaaagcggatgcagctcgtgcttcttgttgtggcagcgctcatatacttcttcatacggcagtccctcgcggaaagcgaggcggtaacagtgcatatccgtacctgcctgtagcaagcccagcagtttcttatcccctgtatgcacgcaggacataaccacttccagcgcagagtagtcaacctcagtgatgcggccgttatcaccgaatcggctggtgaatacctgcttcaccttggatttagccaccccatccccgtcctcatccgggcggggtaggttctgcaggttcgggttagaactactaaggcgcccggttacagtggcacaagtattcagccggtggtgtatgataccggaaccatctgggcgttcgggtattacgtactgcagcattcccttccgctctttgacttctccgtttgcatccagaacttcccgtaaatagtaggtaccggtgtccttctcaagcgccgccagctcattcaccaacttacagaactcgaacccttggcgggccagcgcctccattgcgtctgtgctggtgctgtatactggcgtaccgtcctgcagggtgcgcgcctgtcggaactctccacgctccgcatacttctcccggataacttccggcagctcctggatgttcactaggcccgggcagaagtaaaggtcatcctcccacttaagtttctcctcctctgtatcaaggcggaatacttttggtagccccttgttcttaccggacttgtacgtggttgcacctggcggtgcgggcacgtcatccacggcaacccaagtgtccccgacttgccagtagtcggccttgacgtactggggagggtcatagggcaccttcttgcgatacttgataggcccgccgtacaccagtgcagacatatgaaagtccgagccgaagttgaaatccagagtctccggtaggtccttcgggatatactgctgcagctcctgcttaatctcacagatgcgctgctcctgctcctcctggttcttgcgcgcaattggcatattaacgaacaggccgaaccattcgcagtacgcccaagccagcaaggcatccatacgctcccacacgtactgcatctgattgcgctgggtgaacgtagcacactggccgtagaagcacagggccgtgttctttatatcaccattgactaggtaatccctgagaagaatggggtctatctgcgaggtcagaacaccctgttcccacaatatttttaccccatcaatcttatgctccccaccatactttggcgcagtttcatccaaggatgggtacatactctgaaagtcagacacaatatactccccgtgcattgtgtcgaatacgcggccgccgcgctttaggaattcctcaaagtgttgccgctgatatgttaaaaaccagctaatttcgaaggctgcgttgtgggccacgatgcaccagcaatcagaaggtatgcggaaccacagatgctccccggctacgtcgtcaaggaattcctgcttgctgttgaatctgatatcaaaggtcggttctacggtaactgtgccgtcatcctcggtccggtctatgcggtaggccgaatgcactacatagttgtcagggcagtaggggctagccttgctaccatagtaaggattattctcgacctcaaggtctatagtcataatactgctagtcatactgcaaccccgtgattatggtgataccccgccgcctcagctgccagtctacgacactctacggcttgctctatactgctaaatgaacctaattgtttatttcctagggttgctatccaacgacctctcttcctgtgcacccctacatagccgctgcggttgcttctatatagggacttgttctgcatgttcttctcaggaagcactgccctcaagttatctggggtatcttctaacctgttatgatttatgtggtctatatggtggcctgctcgcagcggaccgttgtgcatctcatatactatcaaacttcttttgtatagcttattatgcagcttaacgtaccagtatccatgtactttgttcagagttcctgcctcggaacctgcggcgcagtttaggtggctgcgtccgcgcccacttctaacctcgtgcttccagtagagtttgccgtctttgtaggtaaaccaaatatcccaattcatttccacttagccctccgagccttgttgatagccagatgcacaatcagctggctgctgtccagtgcgaatcgtttacggaaagtacctgcagatgcagcgtacgccttgattacctcgtcgtctaggtagttgatgtctgacggtttaagcatactagtaaatctcccagcagtgatataggccctacaatatcccactctctctgattgtaacgtgccccgagttccacggtacaaaattccccggtaacgcggtgtcgcaccacgtaactaccgcgtataagtcctgtgtaatccgctttttggataacccctgtatagtctacttgcataaaccctcctgtgtacctacatagcgccctcgtagaaggcgctagggaagtcacttgattggtggcggaggttcgatagcctccagcagcggctgctgcagtaggtaagtgttgtactcctgtatcgcttgtactgccaacccgcgcaggcgcagtgcttcgtttacgtcccaagcagcaccggtggatacaagagagaacgcataagcatcaaagttgaatgtgctctccttagattcagtcagtcctatgtaggcgccgctttcacttacggcgcacacagtgtaagtcctgccaatcttcacgccagtgcggtagaatatatcacgcggcacaacggtgctgcgctttactttatcgccaactttaaacttagacattaatttggccctcatcaaatctacaacgacccggctcgaatcccacctcgaattgcaggagcgattctttaccagacagtgccatcttgttcttcggagtactgataccacggacgttttgcatgtgcggctgctcgttcctgtccaagcatcccatcataatcgccaagtccaaggcaccctgcacgccaatcttgctctgcttcatagcggtgagtggcgggaacagcatgttgtaaccttcgagtgaaagttgcatagtgcctacaatagcgcagtcgttctcgcacccaaggatacgcagctcctgccatttcgcctcaaggttctggtgctcactctccatagtgccgccacggatattcgccaccatgtcgatgatgattaccgcggggcgcatctcctccatgagcgtggatatctgcgccatcgtcaatgagtgcgcagccttgacacgaatccggtcagccctgcctactttcttgaggtaggctggcacgaactcttgcttactgtgccggtccttaatctccgccagagtccaatgcagcgccgcttgatataccctcggcactgtgcgcgtcgctgggccctcgttaaccaaccagaggatagggcggtccccgtatacttccggctgctgctgcatctgctcagcaaagtccacagcaatagcagcaagcaggctagttttaccagagtccacaggagcagccactgcgatgcagtccccgccgcgtaagcctcggatgctgctagcgagttgctcgaacacgcccagtttaagaccgccgctctcgtcagtcgcggcaagtatttcatcaacacttccgctctcccattcaagcagcgaatcatgaacagcagcgccgtccccgtacttgcgctgcaagtgcttcatctccagaaggtaatcaacctcctcgccatcttggtagcgctgcgtcagcgctgctacctccccgctgtaggccagctcattcagggtctggacaatgcccaccacagaatcctgcggcacggcttgtactccccgcataagctcgtccatgattaccctctcttcccgggacaagtgccccgcccggaggttgagcatgctctgcatcgcatcccattgcacctcctggtgctccgggtaagtgttccagtacaaccccacccagtccagaaggttcgaagtgtccggcgcaagcatagacttgggtatctgctctcgcagccggttccacaccttctgcgtgcacattgcacgcacaactattagatccaattagagcctccaagttttagctttcaatacatcgtgcactgctgacacacttacaccaaggctagcagctatggccggtgtgccgtgttccctgctgtaccgcctgtaggtcttcctgatatagtccacctgctgcgctgttagcttggagtacccattctgctcccctttagaaactccacgtctagccctacccctggcaatacagtcatggacgttatccttgaccgtacctaattctaaatgctcgggattaatacatctcgggttgtcacacttatggcgcacaactagccccgctatgctctccggagatatatcgttcgccgagcaacacacctttctatgcagaggtatcttccgccctttgaacgtggtatttccgtaaccctttggtccgcctttctgtttgtgctctttacacgcgcctaataccatctaataactcctgtattgttgcctcttttgggtccccgtcgtagtagatttcgtggcacgacataaagggacgtagcgcacggcgtatcatggccgcgccggagtgtcccgcttggtcattatccatggacagtatcactgtcggtttgttctgtatcagccacgcccttaactgcacgggcaagcgagtacccagcatagctatagcctgcacgttcattgcagagtagttcgtaatcgcgtgctgatatttgatcgctgatagatagtcctcggtgagcacgacctttagaggtgcggccgcagctacagccggtgctgcggcaggtgccgcggcagcgaacggtattggctggccgtacattacccacttcggttgctgtcgggcatgcactgcacggcccagagcagcgcttccgacacggaagattatccgctgtttctctttgctccattctgcatcctccaccatttcaggcatgattccctttgtggtcaggaatccgtaaataaaactctgcgtttccgcaggcgcttggctaatgcaaattgcatctgcaggtgcagagggctgcaccctcggctcttcctgtaactgtatgcgctggtactgcttgtgctccttgcccacttgcttgcagcggtggcaatagtattcccaggcatccgggttattgtagagcaccccggcggcgtccctgccgcagcaccgaaagcgcgccctctgccccacggccaggcgcttgcacgctctaagccagggctggtccattacttctgctcgcgcttaaccgacatagccatgcggcgcaggtcgtgtgccaactgcagggctgaatcggggtcgatgttaatcccaatctcaacctttgcccgagtgcttcccttcttaggaactaccccgatgtacattaaaccttccccatccccattatccttctcaagaactaggcgttggtcatttcccgggtcgcgcttagagttcatgtaggccaccttgtccgggactggcggcagctcatccttcgggtcttgatatagctcgaagttataggcgtaccacgggtaggggtcggctcccccatctgtaaagttatccaactgcagccagtggccgcttgtagttatatctgtaattacgtagtaagcaaaatcccctaggtacgacttgaacgacgaagtgtttttgtgtgctttgcgaacaactttatcaccaactttaaacttagacataatcaaccctccacaatattatcgtatccgccccagtcttctacgactcgggtgcctagttcaatcagctcctgtttgaagccataatcggagaacaccatgatgtactccgccgccttctctgggttctcctgcacccagctaaccaattgctgtttagatagctgtgacacttcccggaacgcggccagtaattgcgggtcctcgtccgggggcatgtcccacggctgccgtgaactgagcgttggtgcagagagccattggtctggctccattaccttcgggtctcgctcaatcggtaggtgcgagaacgtaccatcttgcagtacccgctcaagcacttgccccaggatgttcaggtccagtacctcatccggggtgtgctcgtgcatgtaccctacacctacgttggtgcactcaggaatgataccaacgaactcggctgagtcagtgtacacccccttctgtaagtgctgctccgtgcgtcccaggcgctctgctaggatcttggcaaaggtatcagagcagcagcgcatgtaccgttggtgcgtaatgattccgtcgccgcgccggtcaaagctaatcatcgccttgaccccagtccaaaacccagtgtcatcattgaccgatgcagcgctgccttcgcagccaacctcttcatccacgaagaagcagtagcgtccgtgcacgccccgtcgcagcatctccagcatcaggtagataccggctccgcagtctgcgcctaagcagtcagcctgctgcggattctttacgaacagaacacccttgttagtgcagccgacgtccggcgcagcgctggttggacgggccaccgtatcgaggtgcgacgtaaatgccacgtcgctttgctctgagtcccccaccagcacgaagtagtttccgtgcttgtcctttacgtagtgcataccactaccaagcgcctgcataagcagcggctcgaaccacttggtacttgcccagctaggccggtgcgtttgcagtatctgcaagagcagctgcatatcaatcccgtgaggattcaagaacattaagctgcctcctctacttcttcttcatcgtcgttgcccagatacttctctcccaagcaatcggctgcatattcagtgagaattagcccgtgcactggatgttcttctgcgtgctcaataagcacctgccggtcctgtgcaaacaccagttcttcttggtcatgcactaccccttctaccgaacagtgctcaatgtccgcgtcatatacataggcgtcgtggtaatcagaccaagtgcagctccagcgattatgcagcccttctcggccaactacatatacaaagtccccatcttcgacgcagccgtcgcagaccatttcaccgtcggcggtttcgtgcatatcatcaatggagtagcgcccctcgcagcagcagcaccgagcagattcagtgcctacgtagatgtatccatcggcttcttgcgcctcgtactcgtagtcatcacggattacaaaggcgtcactgccttcttcatcaacaccgcactggctgctatcgaggtacggcatcagcaccgcaccggtgtgttgcgggtgtggtatacgcgccagcattaccccttcgagacactcagtgtttctgatgtacccatgtccgcgcaggattgcatccgcagcgttgccataagcacgaacatactcgttagtttctggcctcacgattgctcgcgcctgcacttcgaagtcgtcaccgaacagctccccggtgtactggatgaacaggcgcagcccattatccggcagcccgtgactggtagtagcgtacgcccgcacagggctatgctcaaaggagtacccgctcatgcagctacccgggccgttctcgtaggcgtcgtaccattcctgctcggtcttgcacaggtacgttttagggtctacgttcatagccttgaggtcttcgatagcatcgcggaagtccacaccatttccgtagtagttagcgagccacttacctacgcgcatctctacgcagcggtactcagtaactgcggcgaagtccttgtgcattcgaggctgccccagcatcacgatgggctcaccgttgcggaaaccaaagcccaaaggcacggcgaatctagacactacgaaaccgtgcaacttcatgagcagcgccgcggcgctcatgtcacggatgtggcgtccgtaattgtagccagtgtactcccggcgctgccgctcttctggtgcaagcataatgcgctcgaataactgcacggcctgcttgtgcaccttgtagccggtgaactcttccacgcacgcaaccacgcgctcaaccactacatcatcaccctcatagaagtcgcggcggcgttcccagaacttgctgtcgatggtgattcgcgccggagaaaggagttcgtagaaagttccggaccggtacaagtccaccttttgcaacggcccactaaccctcatcacctcgcggtattttgggtgcagtatcccgcctatagttacctctaaacccgaggtgtacatgccgacagtacgtagacccataagtgcctgcagtggaccctcattgtgagggtagtctacaccttgcatttgcaagtcctggaacggggtccagtaatcaccgctggaatacatcgaacatttaattggcagtgtgtttgcaccttccggcaacactactttccattcgataggtgctgtgacagtttctttgatagtctcttgcattttaatttgctcctgaatagattcaatgagttcgtcgttaactgccaagtcagcgcgcataccacgcagcgagctgtctttgcttataatacgagcgcacagccgccctaaatcttgtataggctccacgatatccgtaccgtagcagtgctgcaaccacatcgaacttaatgtgctcttgcaactgccgcgcggcagactctgtatactcgcggtacgtggtgagcaccaccgtagagtcctgcctacgaacacggaggagtctacgctcgaccggtatgatttgcttgagttcattaggaacctctttgaatgtttcccaagtgcagccgcacttgccctgcgtttccagcagacgccagcatagcagcgctgtttcgtctactgttagcataggcttctcttaggaacgcagtttcgtgacaccaacacaaaagccggagaggtgataacgtcacctgctcggtaactgctccgcattaatcccgcagaggttaaaagtatgcggcgctcattaattgccccctctaaagggatgagataatacagaccgctataggtctctcggtacacgtcatacttcatactacacctcgtacattaaagcgcaggcagtagcctcgcaaggtcatacccaggcgctgcgcttgcttctcgtagtgctggcgcagcgctgccttcgcgctgtactctcgcgccagtccttcgattgttggttgctgcctacacatcagcagcgtctcaggattctttccgtgcataccttacctcaaatatcgttgttgctcttaccgtccaccgtgagcgttacagcggcgtccgggtactgctcctgcaccgccgcaaggatacgcgcgcccagctctttgcaaccaccctcggggtcttcaaagaggtcatactcagggcgcggctgcggttcctgcgccgccggttgctgcaactgcactgtgcaatagggcaccgggttgtttacgtcgttgcccagcaccagcatagcgctggtcacaatgatgttgaacacgttaaccataaagttgtctccagtcgttgataatgccaagattcacggcgtccagcacagtgcgggcagccatttcggtgtaggtatccacaaattctaaaggggattcctgattagtgtctttgtcagagaatataaccacagtgtagctgtattcttcgtatatccgattgcaccacacgggccagagttcatggcccggatagaccagtattgctttcatatgaaacctcatacgccagttgcattcacatagcgccccgtaggacgctataggcttgctactaggccacttccttcaaagttgcgtccagcacagcacgtacatccacgccctgattaatgagcatactcaccaaatctgcgtcgcttacgccagtctctttggccttcttaatggcgtttttaacgcgccccagcgcttgcaagcgcactgcatcagcgtccagcgcgtcattcttcacctgctccgcttcggcagcgtacagggccatacaggagctatagaagctggcaacaataacttcgcggccctgcttgtcagcttgtttgtagtcaagacgcatagtgtccagttcgattcccagcttctcagccgacgcatagcacttcttagcgttgaactcgtacttaccggactctttgttgaacttgatgggtaatagcgtacgcagcaccatatcaaagtcagcagcgtcactgcgctgcatatccgtagcccaggaaacgttgctgctgataagaccgtggaagagcgcgctgatagtgatgttacgctttgcttccactacgtcgcccagcgctttacgaatgctacccgcagcggtgagcttgaatactttaccagttgaatgggtcataatacacctctttgattgatttactatcggttaatttcacatagcgccccgtaggacgctataggctattaaccttcaccgtagccaaccatttggcacctccctagttgcttagataattacttcacatagcaccccataggatgctataggctgtaattagtgcccaaattgggagttaacagtaggccacccactaggctgtttactgccgcccttttgtttttgctttcccctcaccctgtgctcaccgctcaacccttgtttgctgggcttcacagtaagcggcacgttatcggtagggttaagtgataactgcatattccgccgtaatgctaggcgttttgctttgcgcataatctcacctctcagagtacataatctagcgcagccttgttactgctacgctatgttatatgctctttgcggggtacactccgcgccttgttccctcgattcagaggagcgagctgctctcgcctcggcagtatggtttgcctcagaaccccggtgataacgtccggcacgcttactctttttaactgattatctaggctcggtcgtcatcgtaccagtcaaggtactgggcctccccgcgaaccagcttactgcttgctatctaagttactcagtgaatcagaacttgtcaagcgtttatttcttactacttgctggctgtccagctcggggtattcggtagttcccaaccagcctgtttccctaaactccgatgagcatcacttcttaggggttatctcgctgttagcctctcagcgccctatcgtggttagggttccaatcgcgcatttactgttacacgacatattcagttactgcttggactcaatctagcttatgcccttcgcggtgtcaactctttttatcgagtgtctaacccttcgcactatctagctttaatccagcggagcctcccggctcggccccggttagcacctcagcgcctcccggtgattgaactatagacccattgaaccaaaagaagcaagcacttttttaagctttttatcaccgggagcaaaaagggtaagcagggtaaatacttagaaccacatcagggatagccctatgctggcactagctgtagccactgctagccattacgagccaatactatctaatactacaaagagcagaacgcagtggcgtaacgagagtgaagccacgtagtgatgcggtgactgtgtaggtatgtcagcctactgcgtaggcacagggacatactagggagtgcatagtgagtagtagtgtatatagtgtccctaaacccctcctactccggttacttcatttcataatagctttcgaatgaaagtaagagcaaagggatagcattgggatagcgctggatagcgctggatagcgctggagtgtgccgggtagtggaagtgcgccctagtggggagcgcgcagcgtagcatagaatcggcacaatgtaaagcactaaagatagccagtggatagcctagtgcatactagggatagcactagggatagcactacagcgcactagctggcccactaggtgccacactgtgacgcacaaaataagcaaggcagagcacgcccctatggcccacagggagcgcacagggatagccctagcgcctcatagcacgcactgagagcgcacaggaagcgccctagtgaacgcacaaggacaggcatagggtagcactagcgatagccctagaacgcagcacaggcccgctgaggccctctggtgcgcactagcaggcccacccagtgccccccccccccctaaattgacgctaggtaccccctatgggggcaattggcgtcgttgagggtgagggaggggctcgcgtgagtctaataaatttcaggtccaggtatagacctgctcgcctagactgggcctgggttttacgctgtgcattagaagtgcagcaccaagctagcccgagtagccccgggggtaattggagcagccccaggattaaacagagtaactttgtaggagctgtacccactgtagctactgacaccggctagcagcccatcaacagacccgttaaataccggagaactcaaaccgacaggggcttgagtaatcccgtatgggagagtctgtacagggctagataccagcgtaccggcagctacagcacctggggtccacgcaaagctaaatggaacagaacgagcgcgctctactgtaataccatccaggctcagtgtgtttccggtgctgttggtgaagcgcaaatctccgtccccagttaggctgttacccaagtaaaagtctacatcgaaccaccctggaccagccggtaccgcagcaacagaggagccgccactacccactgctaaggttatgttaccagtagcgccggggttgtagactcgcaaggatactcgcactatagacccgagaaggtgcagcggcaactggtaccgacgcatctcctgacccgcaggaacatccagtgctacagtactagcagccccagccctagtggtacgactagcagcggcagccccgcgcatgtacgcctgcccgataaacccagggccgaacggactatccccgcgcactacgttcatgttcccgctgtatacgcgaggcgggttgatgcggcaagccctagtactactcagtgaccaggatagaacactgctggcatctgcaatgttcgcatcattgtcgaaggcatctacataaccaccttcaatggtccagaattctccttcgcacccatacgccttgttatcagaaataacaataggaccaacagctccagacctaatacgaatacacccggcatacaggttatggtcggagtctgggcggaagtgcgcaaaaccattacgggtaatccaagagcgtgacagctgtccaaagtccagtacgtgctgcgtggttgtgttagctccgtacggtacactatcccactcaaacttattatccgtaatccacaccaggtccgggttactgtttgctgtactcttaatccacgcaccagagcacaacccgaatgtgttattctgaatgtgcaggttattgacgttattattaggaatacctatgtaatcccctaggagtataacactgccgttagaggcacccatcctgcagaataagtttcctgagatgtgactctccatacagtcacgcaacaccagcgcagatcccgctaagttattaaaagcagagttctccgccccaaaatagctccaggaggtgacttcaaccataagtcccgaatcactgctgacagccccttgcagtcgcattctgaggaatccgcccccagttccacgtgtacttgtaccgtcaaagtagaacatcttagcagctgtgctaggtttaatgaatacagccccaagcgggttgacgccctctaggccatcacctataaacagcatagggttagttaggtggcagtccccaacataataagaccccacaggtacgcgcagcacctttacacctttagcggaaacccgctcaatagctgctgcgtagttgccggaagaatccggtcggagtccggtaagtaccggggcatccttcgctaagtagtcagctactctgcaccacaaatcgtcttggctgtagtaccgtgtttgtacgttctctactagtgccatgtgtcccctcttatcgtttcaattcagccagggctgtgcttacgttcttatactgattcccgatggctttgctctgccactgcctgcgctcccataggccccagcacactctattgcgctgcccgttaatatactgggagcagtcaaaggtccagcggttgccgcccttatacacccaaccggtgcccggggacttctgctggtacttgctaatataacgccagtccagtacagccttcccggctgccgcataatcaaggctcttgagatgccgcttcacggcactgccattgaagccagctacacctacgttataaatgaagtctatagacccaaccagggctacgtcagagagctgcataggaagcccgtcaagggcctttgcgtgttcccctgctgattgtatcagttgcttctgacaatcgctcagcgtggctctctggcccattttaacgcccttggtctcgccatagcagattgtagggacaccggcgctatccttgtaggcggtaaggctcaggccctcgttgtgctggactacgccggtaatggcaccgccgagcatagtggcccccgtgagggccgcaataaccttagtccttaaactcatatttaatagtccccttacgtgcctgctcctctaggagcttgaatgtacgtcgcttgtaatacgcattccacgccagggttagcactgcgcacaccgtcgcagtgatgaagctgatagtgctccagttccagctcattaactctgccaaccaacctcctgataccgtagcgccggtaactgctgcacctgcccgggtagcgaggtccgacccaaccatgtctcctaccttaatcatcctgctgccccttcttcctgaatagcttacgaatcaccagaatgaccactaggaagaccaggggaatgctggccccagctaatccggcgaggataagactgtaactatcattgttaaccacctgcaggcgttctgcctggattgtcccggtgctaatagtttgtacctgcttcttactggacgtgtccagggtgcctacgttagaatctgatacatcggttttgttggtggtgctggcgtccaccttgttgttcaggccaacggtttgcttggtgttttcggcaccaacctgagcagacacatccggcttagaaccaactaagccggtgagtgcagaggtcgccgagcaaccagtcagagtaaccgcgagcagtaacccagcgaccagtttacgcattagctagcagccttcactgcggctactgcggcttcaagcgcagcaatcttggtgtcgaaggcggctccagtctgggctacgttctgcggctgcgtaaggatagcatacaggtccttaccgagaatgttcagctgacgcagcagctcctgctgttgcgctgaggttgcttttgcaattgccatagtattactccttactcaatagagattgctgtgattacaccatcttctacagtgatagtcgctgctacggtggcagtagcctctgcctcccgagcggtggtgaacgtaatgggtacggttacttccgcaccattactgaccaccactacagtgccgccgtcagaggcccctgcagcagagagtgccgctactgctacagccccggctgcatctacatccggacccagagtatctaatgggccagtatcatgtgctaaggttgttgctttatcaagtgctactgctgcattacgtactgcctggcgctgtgccagtgttgcttctgcaaatgccattatcttcttcctctatgttgtttacctctgccccggttctgtaaccgtgcagctacaccccgaaggcccttagacactttgctctgtgcccaatccagcgggttatcaatgaaggcccgagccatcttctcagactcacgctcagccaccactttctcatcttccaccaggtgcccgttcagcgtagccaccatcatggcgattgcgtcagcgcggtcatccttagccagactaccacggtcgtacgtaatgccagacaactgcgcgaacgcagagtacagccaacgcctgtcgcgggaatacgccatacaggtactaatatcatcgtgaatagcacgctcatgcactaccaggcggtgacgacgagtaactgggctgattgtgtcgatgatacgacgctctttctgagtggagttgttcagatcccgtacaccgataccggcgagacgtcgctcccgtaaccggttcaggataagcatagacacggtgccatgccccatgttgctctccaccaccatatccgggatgtctagctctacgcacaggtcaatcagtttatcaatgttctcttcgctgatacctccttggaagccgcctacggagaataggtgaatgtacgagttcgcagcgccgccagcagcgtaggacacttcgtctccgccacaaccagccgggtctactaccagcaccttatgctggtacggcaggtgcatgtccccgtagaatgccgggaagtacatctgctggcccataatcccctcatgctcgtgctggtacaggtaccggcggtccgcaatgtaggagaatgtctccggggaggaatcctggctaccggagtaaaccagcatatccgaaagcttgatacgcgtacgcatttggtcggacagggtggtgtcaagcatgtactgcagctggaagccttccggaccgaagtccagctccttctcaatcagcgcatcctcgtcatagcgcccggtgtcagtgctctcgcctaacgtcccgtcgacgccgaagccggtgcgtttatagccgcgctcaataagctcccggatataaggggcaagtgtacttccatatcgctcctccatttcaacagacggaatgcgcccgggccacacgcggacctcgaagccacgtcccggcagggtcttatagatactgtccttggtctgtggtgtgcccaggtacagcgtatccccgtgcgtacagatagccgcaaagtctttcgaaatcatcagcagctgctcgcgctgggtttgtgttaaaccgttcttggtggtctcgatatcatctggaatcagcaggtccgcgcgcttaccctgcagggatgcagtgatacctacacaggctacgctggcggacttatccagaggtttcaggtcgcagttgacatcataaccttcgaatgaagtacggtccccacgagtagggtcagccttcaaatagcacagcagcggccaggtttccagcatacgaatgattaagttcgctacatcagacgcctgcttctctgcaccagacacaatcaggatacggcaggattggtcctgtatgagcctccagacagcgtagagcgcagctagtgtagacttagcctcaccacgctgcgcggccaccatgcgcttcctagggcccttctgcatgtactctgcaatgtcggcctgcatgtccgtgagcgtaaaaccaaggaagcgcataccgatgtatgcgaattcccgaaagtcactgagggcagccgccatcatcatggcgatatcctcgcgctcctctttgggaatactgcgcggattcgcactataaccagtaagtttctggttgagcatgcgcagtcttcgtgcagtcttcaccgataccattatacaattccttctagtaagtcctcagagtctgagccaccaactttatttagaatctcttgcttacgcgcctctctacgcgccgctagttcgtcatcgaactcgtcgcgaaggtcctgcatctcctcggaatctgcgtccgcggtgatgtcgttgtccttcaagaacttagcgataaccgatttatctgcggcggggagcggca

SEQ ID NO: 49 - DNA, 44842 bp, Unknown
  source: /note="Description of Unknown: KP2M-P0209 Bacteriophage sequence"
ctacgtaattacagatataactacaagcggccactggctgcagttggataactttacagatgggggagccgacccctacccgtggtacgcctataacttcgagctatatcaagacccgaaggatgagctgccgccagtcccggacaaggtggcctacatgaactctaagcgcgacccgggaaatgaccaacgcctagttcttgagaaggataatggggatggggaaggtttaatgtacatcggggtagttcctaagaagggaagcactcgggcaaaggttgagattgggattaacatcgaccccgattcagccctgcagttggcacacgacctgcgccgcatggctatgtcggttaagcgcgagcagaagtaatggaccagccctggcttagagcgtgcaagcgcctggccgtggggcagagggcgcgctttcggtgctgcggcagggacgccgccggggtgctctacaataacccggatgcctgggaatactattgccaccgctgcaagcaagtgggcaaggagcacaagcagtaccagcgcatacagttacaggaagagccgagggtgcagccctctgcacctgcagatgcaatttgcattagccaagcgcctgcggaaacgcagagttttatttacggattcctgaccacaaagggaatcatgcctgaaatggtggaggatgcagaatggagcaaagagaaacagcggataatcttccgtgtcggaagcgctgctctgggccgtgcagtgcatgcccgacagcaaccgaagtgggtaatgtacggccagccaataccgttcgctgccgcggcacctgccgcagcaccggctgtagctgcggccgcacctctaaaggtcgtgctcaccgaggactatctatcagcgatcaaatatcagcacgcgattacgaactactctgcaatgaacgtgcaggctatagctatgctgggtactcgcttgcccgtgcagttaagggcgtggctgatacagaacaaaccgacagtgatactgtccatggataatgaccaagcgggacactccggcgcggccatgatacgccgtgcgctacgtccctttatgtcgtgccacgaaatctactacgacggggacccaaaagaggcaacaatacaggagttattagatggtattaggcgcgtgtaaagagcacaaacagaaaggcggaccaaagggttacggaaataccacgttcaaagggcggaagatacctctgcatagaaaggtgtgttgctcggcgaacgatatatctccggagagcatagcggggctagttgtgcgccataagtgtgacaacccgagatgtattaatcccgagcatttagaattaggtacggtcaaggataacgtccatgactgtattgccaggggtagggctagacgtggagtttctaaaggggagcagaatgggtactccaagctaacagcgcagcaggtggactatatcaggaagacctacaggcggtacagcagggaacacggcacaccggccatagctgctagccttggtgtaagtgtgtcagcagtgcacgatgtattgaaagctaaaacttggaggctctaattggatctaatagttgtgcgtgcaatgtgcacgcagaaggtgtggaaccggctgcgagagcagatacccaagtctatgcttgcgccggacacttcgaaccttctggactgggtggggttgtactggaacacttacccggagcaccaggaggtgcaatgggatgcgatgcagagcatgctcaacctccgggcggggcacttgtcccgggaagagagggtaatcatggacgagcttatgcggggagtacaagccgtgccgcaggattctgtggtgggcattgtccagaccctgaatgagctggcctacagcggggaggtagcagcgctgacgcagcgctaccaagatggcgaggaggttgattaccttctggagatgaagcacttgcagcgcaagtacggggacggcgctgctgttcatgattcgctgcttgaatgggagagcggaagtgttgatgaaatacttgccgcgactgacgagagcggcggtcttaaactgggcgtgttcgagcaactcgctagcagcatccgaggcttacgcggcggggactgcatcgcagtggctgctcctgtggactctggtaaaactagcctgcttgctgctattgctgtggactttgctgagcagatgcagcagcagccggaagtatacggggaccgccctatcctctggttggttaacgagggcccagcgacgcgcacagtgccgagggtatatcaagcggcgctgcattggactctggcggagattaaggaccggcacagtaagcaagagttcgtgccagcctacctcaagaaagtaggcagggctgaccggattcgtgtcaaggctgcgcactcattgacgatggcgcagatatccacgctcatggaggagatgcgccccgcggtaatcatcatcgacatggtggcgaatatccgtggcggcactatggagagtgagcaccagaaccttgaggcgaaatggcaggagctgcgtatccttgggtgcgagaacgactgcgctattgtaggcactatgcaactttcactcgaaggttacaacatgctgttcccgccactcaccgctatgaagcagagcaagattggcgtgcagggtgccttggacttggcgattatgatgggatgcttggacaggaacgagcagccgcacatgcaaaacgtccgtggtatcagtactccgaagaacaagatggcactgtctggtaaagaatcgctcctgcaattcgaggtgggattcgagccgggtcgttgtagatttgatgagggccaaattaatgtctaagtttaaagttggcgataaagtaaagcgcagcaccgttgtgccgcgtgatatattctaccgcactggcgtgaagattggcaggacttacactgtgtgcgccgtaagtgaaagcggcgcctacataggactgactgaatctaaggagagcacattcaactttgatgcttatgcgttctctcttgtatccaccggtgctgcttgggacgtaaacgaagcactgcgcctgcgcgggttggcagtacaagcgatacaggagtacaacacttacctactgcagcagccgctgctggaggctatcgaacctccgccaccaatcaagtgacttccctagcgccttctacgagggcgctatgtaggtacacaggagggtttatgcaagtagactatacaggggttatccaaaaagcggattacacaggacttatacgcggtagttacgtggtgcgacaccgcgttaccggggaattttgtaccgtggaactcggggcacgttacaatcagagagagtgggatattgtagggcctatatcactgctgggagatttactagtatgcttaaaccgtcagacatcaactacctagacgacgaggtaatcaaggcgtacgctgcatctgcaggtactttccgtaaacgattcgcactggacagcagccagctgattgtgcatctggctatcaacaaggctcggagggctaagtggaaatgaattgggatatttggtttacctacaaagacggcaaactctactggaagcacgaggttagaagtgggcgcggacgcagccacctaaactgcgccgcaggttccgaggcaggaactctgaacaaagtacatggatactggtacgttaagctgcataataagctatacaaaagaagtttgatagtatatgagatgcacaacggtccgctgcgagcaggccaccatatagaccacataaatcataacaggttagaagataccccagataacttgagggcagtgcttcctgagaagaacatgcagaacaagtccctatatagaagcaaccgcagcggctatgtaggggtgcacaggaagagaggtcgttggatagcaaccctaggaaataaacaattaggttcatttagcagtatagagcaagccgtagagtgtcgtagactggcagctgaggcggcggggtatcaccataatcacggggttgcagtatgactagcagtattatgactatagaccttgaggtcgagaataatccttactatggtagcaaggctagcccctactgccctgacaactatgtagtgcattcggcctaccgcatagaccggaccgaggatgacggcacagttaccgtagaaccgacctttgatatcagattcaacagcaagcaggaattccttgacgacgtagccggggagcatctgtggttccgcataccttctgattgctggtgcatcgtggcccacaacgcagccttcgaaattagctggtttttaacatatcagcggcaacactttgaggaattcctaaagcgcggcggccgcgtattcgacacaatgcacggggagtatattgtgtctgactttcagagtatgtacccatccttggatgaaactgcgccaaagtatggtggggagcataagattgatggggtaaaaatattgtgggaacagggtgttctgacctcgcagatagaccccattcttctcagggattacctagtcaatggtgatataaagaacacggccctgtgcttctacggccagtgtgctacgttcacccagcgcaatcagatgcagtacgtgtgggagcgtatggatgccttgctggcttgggcgtactgcgaatggttcggcctgttcgttaatatgccaattgcgcgcaagaaccaggaggagcaggagcagcgcatctgtgagattaagcaggagctgcagcagtatatcccgaaggacctaccggagactctggatttcaacttcggctcggactttcatatgtctgcactggtgtacggcgggcctatcaagtatcgcaagaaggtgccctatgaccctccccagtacgtcaaggccgactactggcaagtcggggacacttgggttgccgtggatgacgtgcccgcaccgccaggtgcaaccacgtacaagtccggtaagaacaaggggctaccaaaagtattccgccttgatacagaggaggagaaacttaagtgggaggatgacctttacttctgcccgggcctagtgaacatccaggagctgccggaagttatccgggagaagtatgcggagcgtggagagttccgacaggcgcgcaccctgcaggacggtacgccagtatacagcaccagcacagacgcaatggaggcgctggcccgccaagggttcgagttctgtaagttggtgaatgagctggcggcgcttgagaaggacaccggtacctactatttacgggaagttctggatgcaaacggagaagtcaaagagcggaagggaatgctgcagtacgtaatacccgaacgcccagatggttccggtatcatacaccaccggctgaatacttgtgccactgtaaccgggcgccttagtagttctaacccgaacctgcagaacctaccccgcccggatgaggacggggatggggtggctaaatccaaggtgaagcaggtattcaccagccgattcggtgataacggccgcatcactgaggttgactactctgcgctggaagtggttatgtcctgcgtgcatacaggggataagaaactgctgggcttgctacaggcaggtacggatatgcactgttaccgcctcgctttccgcgagggactgccgtatgaagaagtatatgagcgctgccacaacaagaagcacgagctgcatccgctttggaaggcaatgcgtacaagtattaaggctcctagctttgcagcccagtatggcgctacggctaaggggattgcgtttgctactggatgtacggtggaatttgcacaggctttcttggacaacgaggctgcgctgttcccgcaaacaattggcttccgcgctgttgttaaggaagaggtagagcgtaccggtgcggagggtcgcatgtaccgggagcaggcggacgacggcagctatcgaatctaccgcattgggacgtggaccagccctgctggtgcccgctacagcttccgtcagaaagagcagtggaaggaggttgtgcctgggcagcgtaagcagaaggtcatggactacaaggaaaccgagatggcgaactactggtgccaaggggaagcattcttcctgatggcggtggcggctggtatggttctgcgtgcactcttggcccgtgactggttcgacaatcaggtgtgcctgattacgaacgtacacgatgcattgtatctggacagcgccaacccggaggttggacgtgaggcgagcctgctggttaagcagtgcatggaggatgcacctaagcgtatccaccagctctggcctaactacggtatcattggcgaggtgcccttcccggcggaagctgaaatgggtacgagcatgtacagtaaggagaaggtagaatgaatattaaacctggcagtattgtggagatgctggaacttgggccggagcctatcgacccacgacatcgtgcctactttgcaccgggtacgcagcatcgcgtgatatcttacgacgttgaattcggcgaggtggagctactcaatccggacagcaactcagagaagcctggggacggcatcaccttcttcgctggagagtacaagctcatcgcggagtagtgataggtggacccttgggtggtgtagggggttagggtagcatggaaatatgctagggtcaactaaataattaaataaaattatttgttgactctggcttgattctgtgattccccgagaattaatgtgatacgagtaggaacaacacaagagaggcaaccttggctaaagtaagtctaatcaaactgtggaccaaagaagagcaccaacaaattcttggcagtttcctaaataacactgatgcagctattgcgtacaataacaaatttcgcaggggggacgtaatcgtgtctcgccagcttgtacgctactggcgcagcatcttcatggataacaagggcagcaaggccagtgccaaccgcgggctgcaggaggcgcgtaagctaatccaaccaagcccaacggacgatatcgggaatacaaaggtgccggatatgtgccaccgcattctggttgtcggggacctgcacgctccgtatacccacgtagacgcaatgccgttccttgagagcgtacgtgatgcgtactgcccggacatggtagtgcaggtgggtgacgaaaccgacgggcacgctatcagcttccacgactctgaccctaacctggatagcgcaggggtggagctggagaaagccaagctcgtactggaggagctgcatgaactattcccgaacctgctggtttgcgattccaatcacggctcactcgtatatcgccgcgctaaagctcacggtttgccagtgcaatttatcaagaagtaccgggacatcttattccctgagcatggtgctccggcgtggtcgtgggccgacgcttgggtgctcaacacaccgctggggcctgtccgtttccagcatcaagtcagcggtgatttcatgcgcaatgcatcccatgagcgcacctctctggtgttggggcatgagcatggacgcttcgaggttcagtatgctgcttcttcaacggcgctgtactttggtgcgtatgcagggtgcttgattgaccgcaagagcatggcctttgcttatggcagactcacccgcaagaaaccaatcctgggtgtgatggtaatcaccgagggttgcccgcagttaattccgatgctgctcgacgacgatggtcgttgggtagggagaagcaaatgaatgtactggattcaactgtcacccgagtagatgctcctgtatgggatgagcaataccaggtgtatcgtgtaaccctggagtatgactgctgggggcacaaatctgagacagagcggtggtataaagatgaagcctcagctcttagtttaaaagttggtgacataatcaaaacctaattaggagtgtcgatgaaaatgggaatctgttctgtactgggccttatctttgtaaccctgaaactgactggcgttatcgcctggtcctggtggtgggtactgcttccgttctacggcggtgtagctttgctgttggcaatcctggcggcaggcggtgtggcagcagccgcggctgcaggcattaaatccgcacttaagaatcgctaggccggacctgcatctgcacgtaaatatcatttaaactaaacgaggacgtaattatatgactacgaatgtactggcatccctgaacgctctggtagacgcagcaatcgaaacccaagatgtggatatgcgggaaaccgcacagggtggtgcgtacgaggacgtgctgctgccgaagggtgaatattacggttacttcaccgagtatgtggaaatcggtaagcgcctgccgaccaagggtggtaagcctaccggtaagcctgcagtggctaacgtacgtatcggcattgtagtgttcggccccaacggcgaagtgaagcgtatccgcccgtacccgatggctatcagtaactttgagcgagcaggcttcaagaagttcttcgacaagctcaactacgacaatagcattaagcatgcagcgcagcgtctgggccaggccttcaccttcccgattgatgagcacaccagcgccgcgggtaagaagtcgaacatcgtggacctgtccggtatccgcccgattcctaagttcgacccgaacaccggtgaacctattaagatgccagcgctggatgcctccgagattaagctgttcctgtggaacaacccaaccaaagagacctgggacagcctacacatcgaaggcaccttcgacgacggtaagagcaagaactggattcaggaggatatgtacaaggccgtagacttcccgggcagtgctctggatattatgctgaacgctggctctgttccgagtccggcagctatgcaggcacctgctgctccttctgcaccggcggctcccgctgcgccggcagccccagctgctccagtggctcctgcggctcctgtagcgcctgtagctccagcagcgcccgctgcacctcaagcctaataaaccctaatcgaaactaatacggcccctcctggggccttagaggaagcctatgaacatcatcaacatccttatcaaactcctgagtgcagcctacacagcagaagctaaacgagcagatgccaaagcgcagtttaacgagcagctgtcagttaaattcgcagacgacgcagtacgtctggccgctcaatccgaggcgcgagtagaggcctccaagcacagcaaagaggtagcagaagcgcatgcttgtcatgctgataacctgcgtgccaagcgtgacgaagtagctaacttcctgggggtataaatgcgcataatcacatgggccaaagaacagtacgctgtgtttctgcttctgcgcgcacagcgtttgcagaagcgagcagacgactggcgctgggcagctaactctcacgcatacagggcaagccttctgggtcccgagattagtgcgcagcgttatcacttgaatcgccagtgcgccaagtcccggcgccgtgcatatgccctgggcgcagaggccacggccactgagaccaaagcctacgccttcattcaaaaacacaaactgaaaggatttgactaatggataaagtattagaagcgtacgagaaccttgccattacggtcggctcagcggtatacgatgcagcggcgtatggggtgcttaatattagtctggacgacatctacaacgcactagatgagctggcggccctgtacggaatggacctggacctggccgctacagccttccgggagcacaacgatctggcggcacatgccgataagttacgaggagacgaccttgtacttatccgcgtagtgggcacgctcagcgttggcctggcggagattggctcctgtatctacgacgtagaccagagcctgcgtactccggaagtaatcggggacatgctcggcaccgtgctggtgctgtctgaactggaggcttaagtatgttgtacgtatctcgcgcaatttacgtagctttgattctcccgctgattccattggcgggactgtgctaccttggcgataagctgagcaaggcaaagtgggcagaacgttgggttaactgggccgacaagaaggcccgcgatattacggggcgctgatgattatcaacggggttgacttgtcccagcttagcgagcagttagctccgcagaactctgggaagattctgctgtacgatgcggatttttgcgtgtacaaagccgccgctacagtaaaacgtttggataccgcaatacgccgcttctatcagctggtgcttgaggatatgttcctggtcggctgctcagaggcagtggcgtacctgacgcctgcgggatgtgctaagtgcttgcgctggcacctgcctacggctaagccctatcaggggcagcgcgctaatcgacaggagctaccgctcaaggcaccgttgaagcggcacctgattgagaacccagaccagtattctgagcagggtattcaggtagtcagcagtgactacttcgaggccgacgacctctttgtaatggattcgtacagcttcggagaccggggaatcctgatgtcccaggacaaggattcttggctcagccctatggctcggttcgatataccgacaggtacagtgtggcctgcactggaggacccattcggatgggttaagtgggatgacacccaggctatgcctgtacgagcacacgggttgaagttcttctggtggcagatgctagcaggggacgacgcagataacgtcaaaggcatcacgttgcttgatgggaagccctgtggcaagcgaacggcctttgatgctatctaccctattacctcagagcaggacgccgcagaattcgtcgtagcggcttacgctcgaaacaaccaagacgtactcgcagaggcagaatgcctgttcctgcggcgctccccgtcagattctgcctatcagtatctgatgtcactgttgactactcccagtctgcgtgactgggtgcattcgctgcacgagtaccataaacagcatatacagtggatacaggagcacccagacaatggcgaagatgtctgcgaaggaaatgagcctgcgggcgattgagttatactacgaggggaaacacgatgaacttgaaactattctggatgcgctgcgtgaacgagcacccaaaacacatcgaagaacggttgagcatttggattctctcattcacgacaatgctatgctggatgtagttggggggattgaggtatggtaatgagtacaccttgtatagaccatgggagaaaggggcggccaaagactgggttcctatccgcgtgggtgcttattgacggtaaacgccaacctacaaccgcacacaggaaggcgtactatgaacacacaggagagtggcccgaagtagtacagcacacctgtggaaattctcgctgcattaaccctgagcacctgcatggagggacccacaaaagcaaatcagcaaagggttccagcagcggccgctcacgtttgaacgaaggtacggtgcgctatctgcggcaaatgcacattcctggggaccgggaatggggtagcaacgctatagctagacgcctgggtatggctcaaagtacggtatatcgtatgttaagagggatttcatggcgctgcgtaaaataactcgagcacagattcgctctgtggctattaagcttgccaaagaccagggaggtatatgcctcctctgcggcaaacctttggacttcacaatcaagggggtaactggtgattctgttgtcgttgaccactgtcatattactgggcgtattcggggtgctcttcatcgctcgtgcaatggaggggaaggcaaagtggcatctgccgctgggcgctggattgttggtagcatgcaatcttctggggctattgctgaatctctacgtagggtcgccgattacttagaccgagaacctacggatatgctatactatacgcacaagacgccggaagaactagcacaagcacagaagctcaaggcccgcaaggccagggcacgacgcaaagcacgggagactgttaaatgattgaatccactaaattctatgcaggtgatttggttgtgcgcaaagcgagtcacgtagggggtatctggaaggacatctgtgaacagctacaggtagacctagactcccccagattagtgacgtgcgcagaagacggacttataaccttagccgagtgtgggacctcttggcgagcggagttcttccagctcttccattcgaagagcgaggctgtttctgactcagtgaactctcctcggcactaccagttcttcccggacctggaggcaatagaggtaattgcacgcagcatgacgcaagagcagttctacggctattgtctcggtaacagattaaaatacagactctgcgccggtaacaaggatacactggagcaggacattgctaagtccgataagtacccagaactgtatgagcaacaccgaggtaagtgcattgacgcttagtgcatggtgtcatgagatgtggcagagggtagtagagcggcgcgacaaaaagcacggggaggggctattaaatgaagacagtaatctttgatttggacggtacactagctgatggcgcgcaccgcttgcacttgctgcctactgtggatttgtatctgactgacagttggaatgagttcaaccgggcctcgaagtatgatagccctatccacagcactattgaagtgtgcaacatcatggtgcgagcagggttgcgagttattatcttgacggggcgctctgatatagtacgagcggaaacagaggcctggctggagcggaacttcgttatgtactccgagctggttatgaggccgcacagtgacaaccgaaaggatgtcattatcaaagaggagttcctgcgcaaccaagtggggttagaaaacattgtggcggcttgggatgacagccccgcggtgattgagcatttccgcggactgggtattaccacttacgctgtatgcgactatggtgcagcagcacatcgaacagacttaaaatcccacggggtggaggaattagcatgagtgcagtaggtacaggcatgaagtatgacgcagacaaacctcgaatggacttgctactggacgggtgcccgaatgcgttgctgcgtatcagtgatgtgctgaccttcggggcccagaagtatgcggcacacagttggcacacggtagccgaaggtaagtcccgatacaaggccgcgctactgcggcacctcacggcacatgctctgggggaaacactggactcggagagcgggttgccgcacctggcgcatgccgcttgttgtgcattatttattctagaactggagcagatggatagtgcggccgagtgagtggtgccacgggatgtggcagaaagcagtagagcggggcgacgaaagctccgctaaagactacctggagatgtataatctctgggtcagccgcaatcagtagttagaagtaccggacataaccaaggagactaagcgcctatgattagcgccctgaatacggttgtagtaccagaggaagcactggtgaaacgccagctggagcttgaagagacctataagattcgcggaatcgagcgggcacgtaagctgattacggacgcattgcagaatggtgggattatgaacctgccgatgacgcagcgtatgctcacctctgcatatgaggtggctgctgcagctatcgatgagatgcgaaatgtcaaagccccaggcattggtgggaagtaccgtcggttcctgcgcttaatccccttggatgtcctgaccaccctgagcctgtgcacaatgtttgaggcgttcagcgtcgcccctggcgagtccgccagtcgccgtcagactgcacaggcggtaatgtccgcactgggcagaaacgtacagtcagagctactggctctgcagttacgcaacgtagccccagcgtacatggaccgagtatatgagtatctcacagagcgccgtacgaagtcccctacgcacatcctgcgtacgctccgtgccagtgccgagaacgtacactatgggcacgagccttggaccaatgcccagaacatctccgtagggcgtctgctgtgtgccgcagtgtttgagacgggactgttccagtggaagaactgtagcgggaatctgagcatgctctatccggctgacgacgttatggaggccttccagaaactggtagagtccgctgataccgtaaccatgaagccacctatgctggtaccgccggtgcagcacactactctgtgggatggtggatatctcacccctatcgacaatcgcggcacctatcataattctcatatcgaccgcgcacgtctccgtgaagtagcggaagcatttaaatccgcggatggcatcaaaaaggcgcttaataaggcacaggaaaccccgtaccgtattaataagcgcatactggaactggtgcaagaagcacgggccctgggtgttgggataggtatgcctcgctcagtaccggagcctaaaccggagtggtatctggacggggttcctaaagagaactacacagaggaagagcttgaccgcttcggtgagtggaagacgcgtatgtccctgtggtacagtgctgaccgtaagcgcgtatcgcaactacgcagccttctgactacgttggagatggcagaggaattcaaagatgagaaagccctgtacttcccgacttgtgtggactggcgctaccgcctgtacttcaagtcctcgctgcacccccaaggttctgatttgcagaaagccctacttgaattcggacgtggtaagccgctgggggagcgtggcctattttggctcaaagtgcacgtcgctacatgctttggttatgacaaaaccctatccgaagaccgtgcagcttgggctgatgcgaactttgcagagattgagcaactcacaatctctccgtttgattgccctgcttttgccaaggcggactccccctggtgtttcttggccgccgctatcgacctggttaatgctattcgttctggatgcccagaagagtatattagccgaatcccagtagctatggacgctacgaactcaggtgggcagcacctctcagcgctcctgagagaccctgtgggcggtcgtctgacgaacctgtactgggagggtaacgacaagaaagcggacctgtatatggatgtgaagcgccgtacggacgagaaggtgatactggacctggacaaggaggatttcgttatccagagcacttactggagagagaacgaaatcacccgcagcatgaccaagcgccccagtatgacctacttctacagcgccacggtgcgcagctgcagtgactacatctttgaaggcgcttgcgctgaggggtatgaaggtaccgacactaacagtctatggaatctgtcgtgctacctagccccgcgtatgcgcgccgctatagaggaggcaaaccctgctgctgcggcagttatgtcgtacttgcagaacctcgctaggcgtgtaccggcaagccagcacctgcagtggtatacgccgctgggcgggctcgtaatgaaccgctacacacagcgtgaagaagtgcgggtacgaattgactgtatgaacctcacaatcatgcgcgtgcataatcgggatttcaagacctgtaacaagcgcaaggcagcctcggggattgccccgaactttgtgcacagcctggatagtacgcacttgatgatggttctatgtgccgccgagggtctggacattgtgccgattcacgactccctggctacacacgcagccgatgttgatactatgcaccggcacatccgcgagcagtttgtgcgtctctacgaagagcatgaccttcttggggatatcacccgcgcggcggcagcagctggtgcggacttgacggacctggatatgccagaggttggtactctggacatccggcaggtactggaatcacctttcttcttctgctgagggtatggtatgcgagtactagtaactggtgggcgagattacacagactacttagcactaaagaccgcaatggatatgctgccaaacaaaccatctgtagtgatacatggaaatgccagaggggcggacgcactggcagacaggtgggccctggaatccggtatttttgttctgcgtatgcctgccctgtgggatgtgcagggtaaatctgcaggtatgcgcaggaacgccgccatgatatccttggcctttccagaatactgcgtcgcctttcctggtggaaggggtaccgctggtatggttgagttatgtagaaaggccggtataccagtttgggtaccctactaaaatttaatgttaccggagtaggaatgaagttaaaacacactggtaaaacttccgattacactctcaaggttctgtataagtctgacgatattacagacgcagtgaagcaactgcacgaactgggccacggcattagtcggggcctggctcctgagcagcactactggagggtgttgggaagtatactgggtaaacagtatatactaggagtctatgactcccaaggcgacttagtcggtgccgtcagctactacccagaggctgtagaggactgtcattacgtagagcctgtgctatatacagacttcttcgtattgaaaccggacaacggcgcggcagtgtctgtgattatgcagggcctgcacgcaatagccaagtgcatgcgcgctgggcgtatcgccattagccggagcacgtctagtaacacgtacaaaacaacttatcatttagtgaggtcagaatgagtggtggtttaggtaaactgttaggcaaggccacggatatgctcggccttactgacaacgcaggattagaggcgcagcagcgcttggcagagcaacaggccagcgcagctaaacaacaggctgccttagaggctaatagcgccgcagataacattgctgagattgaccccgcaggggctgcctctgcatctgcagatgcaattacgtctgagcagaagaaacggcgacaagcagggcagagcaatcctctgggcctgtaagggggtagcttggaacaaaaagcaacattagcagaactctttaagaaggaccaggacgcgggcgtcttggatgcctctgagaagttcgcgcagtggacgctcagcacgatctttacccgggacgattccctggacggtagacgcaggccgctggagcgagactatcagagcaccggcgcgcagctggtcaacactgcagccactaagattgtaggggccctgttcccacagggcaccagcttcttccggttctccaagagttcggacctggacgagttcattagttcgctgggcagcgcagctacagcagaatctaagctggccgaggtcgagaacacggcgtcacagaaagtatttgagaaagacggttatgctgcgaagttgcaagctgtgaagctgctgctggttacaggtaacgcgttggagtatattgatgagcggacaggtaaatccatcgtctactcagtccgtaactttaccgttcgaagggatggcagcgggaacgtcctgcgactcattatcagagagcgcgcaagcgtccaggacctgccagaagatttccgcggcaccttctaccgtgacaaagacccatacggcgacgttgatatctacactgccgcttgtcgcaaggttaagcggacagaggaaggcgtagaagtagtaagctacgaggtgtaccaagaagcagacgggcaccgtatcggagacagcagcacctatccagagctggagcttccttacaacgtgctggtgtggaaccttgttagcggcgaacactatgggcgcggcttggtagaggactacgccggggacttcgcccgattatcagtactgtcggaagcgttgactaactacgaggttgagtctgcgaggttaatcccgctgattgacgcaagctctgggttagacgtggacgagttctcaacgtcggagacgggtgaggctgtgcaggtgggtggtggcggttccaacgggaacagcaaatcccccgtcactgcttacgagggcggctctgcccagaagattcagtggattgccagcaacatccagatgctcgaacagaaactgtcacgtgcgttcatgtacaccggtaactcccggcagggcgagcgcgtcacggcctacgagattcgccagaatgccaaggaggcggaagccgctatgggcggcgggttcagtattctgagcgacacatggctgcgtaagctggcgtacctgtacaccgcactggtgtatcctcgctttaagctgtacctcagcgaaggtgtagtgagcatcaacgttacggtgggcacctctgcactcgctaaagccgcggcagcggacaagctgttagaggcggcgcaatccatgcagctggctatcccggtgcttgagcagattactccgcgcttcaacaaagatgcgtgcgtagattggtacttcgacgcctacggtatcgttagcgagccgttcatgtacaccgaagagcagctgcagcagaagcaacaggttcaggatgcgtctgccgatacgtccgcaggtctagcacaggaccaactccagggcttgacagcagcagacccgacagtagcaggtaagcagctgggcttattaccaagttaacaacagaggcatagatggataacgtagaaaacggtcagaacgtagaaactacacaggtagagaaccaaggcggccctaagattccgggcctaggtgctccccttagcgccccgaacaatcaaggcgtgcaggatgcacagacccctacccagcagcaacagggcaaagattcccctgaccctgctaagattcctctggatatcgaagccctaaaagcggccctggataagggtggcgatagcgctaaagagcagccccaggagctggctaagacaggcaacccgacgattgacgccggtgtagctatgttgcagaaagtctctgggttaactgactctgatatggtgcgggcacttggtaaggccctggagtatcaggaccctaacctaatcgatacggccttcattaaggaacgtttcggagagcacgctgcttatgcagagttgctggctaaagcgtacctggaagaccaggttggtcaagccaccaaggcagtacaggaagcttacgatatcgtgggcggtaaggagaactgggaggtagcagcgcagctgtttaattccaaggcccctgaacctcttcgtaacgcggctcgtgcactcgctaactcgggtgagctcaagcaggccgctgagttggtggcaagcttctgccgggatatgggtcttatcaagacacagaacccaatggtacgcggtgtagccagcaacaatgcactatctgctgcggaattccgcgcagaatataccaaactccgtcaggaagcgggcaaccgtagcttggcgtctccacagttcagtcaacgttataacgatttgctcgcacgccgtgaagctggtaagcgcgtaggtctttaattttatttataaaggaaactaaagcatggccaacactatttataatggcaacctgacccgggcccactggggcggcgcggcgtctgacgtagatattcacctggaagtgtaccagaacgaagtggatacccgcttccagtaccaggctctgttcctgggcctctccagccagcgctctatcagcggttccaacacctaccgtattgaccgcctgaacacctcctcggtgaagggtcgtcgctctggtgaggcgctggatagcaccccggtccgtaacgataagatgattatcgtggtggatacggtgctgtatatccgtaacccgattgactaccaggacgactggaccggtccggacttcctgaccgagatgggccagaacaacggctccgagttcgcagagacattcgaccaggcgcacctgattcagctaatcaagggccgttcctgggttgctccggcgcacctgaaaccggcgttcaacgacggtattgaggtgggcgctgctatcctggttcctggcaccactaccgccacacagctgacccaggctgagatggaggctaacgccatgaacatcaacctggcccacaaggctggtattgatgaactcatcaagcgcaagaccccgctgtcggacatgattaccctggtggatgtcgatacctattcgcgtctgctggagcatccgaagctcctgaacctggaatttggcgcatccaacaacgacggttacaaagaccgccgtgtagttaagatgaacggcgtgcctgtggttgagtgcaccgagttcccaaccgaggccggtacgcacccgctgggtagcgcctacaccgtcacctctgacgatgcgctgtgccgcatggtgactttcagcaagtccaagaccctggtgactgttgaggctaagccgttcacctcccgtatctgggacgatgagcgtgagttcagcaacgtgctggactgctacgcgatgtacaacatcggcctgcgtcgtccggacaccgctgcagtgaccaagttcaccttcaccaccaagtcctaattggaggttcaatggcagtaatcgctacgttcggtctggagactctccaggccaatgcagctcagcgggaggcggttaaggccgccaccgatgtagctaagaacatccaggtggcttcggttgaatctggccgcaaggctaccaagaaaacccgtaaggcggctgacgtagccgctgatactgcggaagagtaatacgcgcccctggtgccttcgggtgccaggggctttttttttttgtccctgtcttaaaggtccaaggggtctttaatagaggaacaaatatgagagaattagacgctgttaacctgacgctggaagcccttggggagtctcgcgttatggacatcaacactagtaaccctagcgctggattagctcgctctgcactcgcacgtaaccgtcgtgggttactcagcacgggattctggtttaacgtggtagagcgtgaagttacgcccaccaccgacggcctgattaaggtgccatggaaccagctggctgtatatgacgcctgctcagaatccaagtacggggtacgtgacgggaatctatacgacctggtagagcagaaccaatacttcgatgcacctgtgcgtattcgtgtggtcctggatttggcctttgaggacctgccggagcacgccgctatgtgggtggctaactacaccactgcgcaggtatacttaaacgacctgggtggcgacagcaactacgctaattacgcacaggaagctgagcggtacaagagcatggtgctgcgcgagcatctgcgcaatcagaagttcagcaccagcaagacccgctttgcacgcagaatccgccgtgctcgttttatggtttaaggagagtatatggcccagtccctagagggtaccattcagagcctgctgcagggcgtctcccagcaggttccaagagagcgccagcccgggcaactgggggcgcagctgaatatgctcagcgacccggtttcaggtatccgccgtaggccgccgggtgagattgtctgggaaagcacaatcgatagccctgggcttgattccctgttcactgaatacgtagagcgtgggactgacggtaggcacctgctgattaacaccagcaacggtaactggtggttgctggctaagaatggaaagaccatccttaattccggcaatgacccgtactttgttaccaccgtaggccagacctctttgcagaccgcaagcattgccgggctgacttatatcctgaatacggagatggccccgaacacaaccgtggacaatactgggcgcatcgaccccagcaccaccgggttcttctacgttaaatccgcagcattccagaaacgctggaacgtcaccgttacctctgcgggggtggactacactggggactacaccgcaccggctgctggcagcacgagcggtaacgctgaggaggtatcaggtgcctacgttgcccagcagctgcgggactctcttgtagcgaacgggctgccctccgggaacgtgagcgtacgtggtgcgtacctgttcttctacgggttgagcaactgcgtggtatcctctgacgcgggtgatacttatgccgtggtatccaaccagtcacgtgtagaccaggagcaggaccttcctgcacagctcccggcgcaagctgacggggcaatgtgccgtgtaggtacagcctcgtctgagacggcgtggtatcagttcagctacagcacccgcacctggtccgaggtgggggcgtacgatagcatcaccaagattacgaacatgcccagagagctcgccgcggatgacaacatcattgcgcgggattgggaggggcgcttagctggtaacgacgataacaacagtaatccaggattcgtcgagaatggctacatcactggtattgcagctttccagggccgcctggtcctgcttagtggtagctctgtggatatgtccgcctcgggcctgtatcagcgattctaccgctctactgtgacgtcactgctggatacggaccgtatcagcattagctctgcgtctgcccaggattctgtgtaccgcaccgctgtgcagttcaaccgggacttggtcctatttgctaacagcatgcaggcggttgtgccgggttcggcagtacttacgccaactaacgcaagcattagtattaccagcacctacgattgtgacagccgtgtgactccggtaatggcggggcagacagtaatctacccgaacaagcgcaacgacagctacgcgggtatattggagctaatcccatcaccttacaccgcggcacagtacactacgcaggatgccacggtgcacctacctcggtatatccccggtagggtgttgcagatgcaaaactccagcgtcaccaatatggccttctcgcgcatgtctggagagcgtaacagcctgctggtctacgagttcatgtggggcggaagtgacggcgctaagatgcaggcggcgtggcataagtggtcgttcccgtacccaatcctgagcgtacaggcgctggaggatgaggtgttcttgtacatgcaagggcccagtcccagcaacaagcttttgattgtgtctatggacccgcgcgaaggttatcagctgggctcagagtaccgcgaagcctactcggatttgcagaagcaagttcaagtgcaggacggggtgttcactgtcccgtcggtattgcgcccggttgggtgggcggacaactacaaggaagagcttatcctaacgtacctacccagcaaccctatggggcctactgaggttggcatcaaggagattgctggggagaacaccctacgggttgtgcgcggtgtacctgatggcacttatgtaatcgggagacgttaccgtagtacgttcacgctaactacgcctattctacgggaccagaatgacaagctcgtgggaagtgggcatgtgcgcctgctgcgcctggacgtggcagtacgtaactccgggcacttcgacgtacaggtactagacaccccgcgggacgtcaattggggtggggaactgactggtatcttgatgaactcaaaggagctgacgcttgggcaggccctgcgtatggacctggctacgattaccgtaccatgccgcactaacgcagacacaaccgaggtgtcactatttactgacggttctatggaactgaacgtgttggatatatcgtacatcctgcgctacaaccaacgcagacggaggatttaatatgtggtggatggttgcggccatggccgctaagaccgttctggggcagggtgctcagattgaagtgtccaaggccaggaacaaggctgtgattcaacagacagccaaacagctaaacgacatcgcgctacagcgcgcccagtccagggaccggactgaggtgtctctgtttaacattcagcagcagaagctgcaggcacagagccaagtaggactgcaggcagcagcttccggcactatgggagcctctgttaaagacgcagtagccacggtgaacactgtagccgggcggcaagaggccagcgtgcgtgaccagcaggcaactcaggaagagggcttccgtctaatgacagataaggccgtggatagcggcctggctaacatggacatggaggacccctacgataacatgtttaactcgttgttgagtgtcggggcatctgccgttgggcagtacgctggtaacgctgcgtcgtctactgactctggtagctcttcgcctggtagcggagcgtcagctacgcagagcatggcatcctcctatgacttatgggggagtaagggcaatagcccagttcacacctggtaaattaggaggaatactaaatgcctgtgattcaacccagtagacaggggttaaatatcggtggcgtgcaactgcaatccaacgatgttagcttgccgtcaacggtaagtgaagtatctgttgatacctccaaagcaaaacgcctagccgccctgtctggattcgtgcaggacttcggcgtaggtttcgacgcggcagtaaaagaaaacgccgcagccgccaccgtgcgcggcgctatggatgctcagggcgcagtagatgcaatggcctccaaggacgaggctgtacagaagcaaaacatcttcgtgcgcgaagcctatcaggacggctacgtatccgccgcagcgtacgacactctagctaagtggcgcacagacagcatagcccgggctaagaaagctgccgaggcagggctgactgacgaggaattccagcagcaggagcaagagcacgtacagtcaatggcagacaagctcggggtgtatctcccggatatgtccaagcagtctgctacgagtatactgcagcagctccgcgctaccagcatggctaactatacagccttccagaaaggacgtgctgcgttcgccctggcccaggctgaccgtgccctagaccgtggactgagtgcgtccagcgatgagttctatcagcgtctgcaggcaggacagggtgccgccgcgcagatgtctatcaagaccggattagacagtatcctggctgccgagcacttggacaagaacaagaagctggacagagccaagcagtatctggttagcgtagcgcagcagacgcaggacccactggtaattaaccagctgcaggaaatggccaccaaggaactcggcgtcaactccgtggatgtcaacgcggcactgtatcaggagttcaagcgcgcaggtgctcagattgagacacaggcccgtttcgaaatctctgatgcaatacagtctcttgaggggcagacacctgagcagcaagaacagactatgcagcgtattcgtagtcgtgtcattgagctgtcggcatctgatgtacttagcgccgggaccagcatggagttctggaacaaagcccagaccattcgagagaaggcagcagacgcccaagcattgcgcacagcaattactgggaatatgccaagctctactctggcgggcatgttcaaaggggacttagataaggcacgtactcagctgctcaagagctttccggatacccccgaagggaacctgcagctgctggcatacggaagcaacagcaaggatgcgtgggccgtaaacgaggcgcacaagcgtatgtcttcggatatggcacgtacgctgactacgctggaccagctcggtgaagatggcgaggtttcccgcgagaacgtcaatagcatcaacttgtgggcacaggcttatagcaccagtacggacttagggaagatggcgctgctgtctgaggtcccatctgagtggcgtggagtggtgcagaaagctgttacgcaaaacccaaataatgccagtaacactatcttggacgatcttcgccgccaggctcgtaataaggcgagtgggcgctacagcaatatccaaagtaaccccacggacaagatggtagacccaagcggcacggctaactggttcagcttcttcggggatgcagacgcacagcgccaggaagcgcgagctgctatggaagatgagtaccgttatgtgtataaccacaatccggaatcccttgtagggaaggacgctgacgacatcaatacgatgctaaaaggcaatatccaatcccgtaagctggagctggacattgccggggcacctaggcatgtgtatctgcccgctggcacctctatgcaatctatcatgggtgattataagggcgaccaagagcagttcaaggcctccctgcagcagcatatacagaaccaggttcagtatatgtcagaccccagcaacatagagcgtgtagtagtgcaggccgccaccgctggcaacgcaggtcagaacatgaccgtaaccgtgttcgacaagaagggcaccttccagacgatgtctgtgaaccttcgagacgttcagacgactgcgcaggctgcgtatgactcagcactggctggagagatgaagattggaagcgagcaagtaggtgtacgtcctgccaccttctacgaccacgacaacgggcgtgccgtcagcgtacaagtaaatggccgtaactcggtagggctggaaccatcactgtttagtgacatcctagccactactatgaagttcgaagggttccgagaaggcaagggtaagggtagcgtaggcttcggcctgcacgttaactctggcatgcccgtcccccagaaagttaccattgacgacggtatcagtatcctcaaatcctcactggaggagcagtacataccgaacgtgcagaagcaactcaagggacagggtttgactgcctccgacgaggcgttaaaggttatggtggacctgaactatcacggtggtaacggtagctccggccccgtagcagaggcgatggcacaggtacgcaaggctgctaagtccccggtgggggcgtatcagtaccctgtatctgaggcccagggtagggcttggcaagcgctgcggaataccccggcgtacaagcaggcccaacctgggcgtaagaagtacctggaacaaaacctacgtgattggctcttcgaagcaacgcactaaccagaggcccttcggggcctccccttatcaaaattcttttaggagatattatggctcagtttctgaaccaagaaccgaatccacaggaaaaggattctgctaagggcgcaacacttaaatctgcgcctgagcgcgtagattggaacgatgccggggacaacggtctgaacgcactggggcgtgcctcattactggcacaggccaagaccccagctactacagccgcagagagctttgcctcgggtatgggcaacagcatcatcgccgcagctatacgcaaggcctctgccccggcatttgaccgagacccgaactttaatgccaagcagaccctgagtagcgatactcgggctaagctgtacgccccaaatcaggaagagattgagtacctgcatgactccgtgtcagtagaagattacaactaccgcatgcagcagatgcttgagcagcgtgaccgtgaccgcttaatggctgacaacacagtagctgggttcgcgggtatgttggtaggggattccccgttcatcctggccccgatgtctgctgctggtattgctggccgtgcgggcttagctgcacgtaccgctatacgcgctgctgatgtaggtactgcattctatgcacaggaccaactggggcagtctgctgcggtaactgcactgatagcgggcgtagctgggttagaccagctctgggatatgtctagggctgctaaagctgccgccaaggctcgtactgggcgtgagcctatgttcgacccagaagcgcctacaactcgtacagctagggatgctaatgttaccggagtaggagagggagaggaaattctcactaagacactggatgaaagcatccaagtatcgagaaacaataccgcctccgtgaacatgaaagcacagcacgtagttcagttcttgaggaagtctgagcacttgacagcaggacagaaggctattctggacacgctgggcgatgctgtaaatgacattgattttaaactagtagcaggctccgcaaaccgcagccgctacacttatgcacaacaagatttagctaagcggggagagatatccctgcgcgcgcctaagcaagctaacggcagcacctggactacagtcggtgatgcgctgcgcgctatggatgcagatacaagcaaggtggccgtgcacgaactgattcatgccgctactgcgcgcgctattgacagtaatcccgagattgctaaacgcctggaggaagtgcgcgctgttattgcggctgattccaccctgacaccgcgtatgcgatattacgcaagtaatgtgcacgagatgctggcaggcttaggcgacagccctgagtgggttgagcacctggcacgtacgcagtctcccaccggcaatagcatgctccgccaactgggtgagtacatcatgaacgctctgggcatcaaggccaaaggctctgccttggaggatgtactggatgcgtatgaggatgcagttaagtggacagctaaggattatgcagaccaagcccagagcttccgtagtgaggctttccaggacctggcgggcagcactaccctcaacgaggctaagcgtgcacaagctatgctggacggcgctaagaagaagctctccactatgtttgcactgtacgataatatcgcccaaggcaacgaagacttggctaaactgctagtgtcggatgcgtctgcagtaggcggccgtcgcccgtcagtggtagactacaagcgtaacctcactttggagatggatgcccgcgccagcgtagttgaagatgctatcctaggcgcgttgaaggataagggtgtaggggtgctctcacgcttcttccatcggagtaatttccgcgctgagcgggctgcgctggaggaccgcctgagcaagtacctggatgctgcctacagtgctgacgtaaacggccgcgctgtgccggtgccggatgcagagattgctccgctggttgatgcttaccgccgctctggctgggctagcaagtggcacgagcatatgctcaatgccggtctagtggatgatggtgcgttggttaaatccgactactacttcccgcgccagtacagctacgacaagatgcgccaaggtatcgcgcagggtaacactctggacgactaccgagccctgttccgggccgccctgcgggacgtgtaccctagcatggagtcagaggtagtgcagcgtgttgccaaggagatggttgacggtatctacaacggccgtgcgggacagtctggccctatgtggaagcagctgattaacggcatgggtaacgatgaggtcgtcatggctatgcgcagcgctggtgtagaagagtctgcaatccagagcttcctggctggtaacgtacgagaatcaggcagcacatcccctgcgcggaacctgcgtcagcgtactcggttcaacatggacaaagagtacctgattaacggaaagagcatgcgtatgcaggacctgatggatactgacgtagccaaggttatgcacgggtacactaaccgtatgtctgggcgtgtcggtatggcctatgcaggcgtacaggacctggggcagctcgctaagatgattgacgagtccaagcacgtactggcagattctgctaagtgggagaagaccgtcaatgacaccatcgactttatcctgggtggggcacctgctgacgctgggcagcttccggacttgctgcgcgcagccgggaacatggctaacgccactatgctcaagaactccggcctgtatcagctgaccgacactgcgttggctatgaaggagtttggtatggcccgtgtgctgcgcagtatgcgagaccaaccttggttcaaggaaggtgccgtagctatcaagactccggatatggctgcccgcctagacactgtgctgaggggaaatatccagaaggagatgcgcttccgctggctgaatacgtacgctgacgataacctggacctgacccgtcaggcctcctggttcaacgtcactcagaacgttgggcaggctgcacgccacgtcaacggtatgagcatggtgcatcggctgcaggttaacctgaactccggtattgtggcggacgagcttacgcagatgttcaagggtgatgctgaggcgtttaagcgtctggagcgtttcgggcttacccgagatgttgcggaccgcgctatcgctgccaataaggctaacccgggcgccatgttccagccggacctgcagatgcaagttgaggttgtaggggcgcgtatgatggactacctggtacagcagattcgtactggagagacctcacactttgcacagttcaaccctatcggcaaagtcatcgtagggtaccagagcttcgcactggctgccactaacaagattctgcgtagagagctgaacgatgctgggtggattggtgtagcccacattatggcataccagttcccgttgatgctgctggctactatggctaagcatggcatggatgggaaggacgtagacacccagaaactcatcagtgagtccgtaacgggtatgagtgccatcggcggggtatccttactgcaggatatcttcctgggggattctccccgccactcgttggcgtctatgggttatgtcacagggctgctcggggccgtacaggacctggctactggtaatatggacatcaagaccttcactaagcaggtaccgttaatccaggaattcgcacctacgcgagctatcatcaataacttcggagacgattaatatggcgttcagctggcaagaacaaatcaagccagctggtacccaggatatccagtgcgatattgagtatttggacaagtcctatattcatgtatacctagacggagaggaaaccactgggtacacctggaccagctctactaatatcaggctgaacacagccttaacggcggacactacggtgctgctcattcgcaagactgagcgggagtacttgtatattgagttcgccagcggctctccgttcattgaggtgaacgtagattctcaaaacacgcaattcttacacctagcccaagagcttgtggaaggccgagctatccccggattctacgggaatataagcatgaacgggtaccgcatcactaacgtagcggacccagaagacctgcaggatgtggcaaccaagaactatgtagatactggtgatgcggcactaggtgtccgtattgatgccgaagccgccgcgcgcaaagccgcagacgatgcgctcgatgttcgtactaccaacctagagcagacctttatctcgggggagcctacggtaagctatccctggtatactatactggccgaggctactgacgaagttacgcctggattgtctttcacaaaggctatagtgtacgtacaaggcgtaaatcagattccgggctacagttttgaggtggtggataacactctactgtttgcagaggtacttccagctggtactctagtgtctgccagattggggtatgatgcagagctttcggaaacttacgctacagctacggcattaggggaagaggcgtcagccagggctaatgccgatgcacagataattctggattaccaagcagcagtagcgaccaaggcagcaaagggtgctaactctgatatcacgagcttaagtggattaactacaccgctgagtaaagctcaaggcggtactggcaacactactggtgccgctgattcagctgcgaagctagccacagcaaggactttggtggtagatttgacatccactacaccggccagttttgatggttctggcaatgccaccttaggggcaactggcagccttccaattacaaaggggggcaccggagctggcgatgccgccactgctaggactaacctgggagcagcggcgtccggcagcaacggagacatcaccgcattaacaggattgagtgggggtatatccggccgcactgacggtgcagctgcagccgccggtgtagtgggggaagtactgagtgccgcaacctctgcagccgtaagtgttaccagcggcaccccattgaacgttctgtccttgagcctgccggcgggggagtacgagcttgagagtgccctgttagtcactaatagcggcaacgttactgctctcagttttggagttagtagcaccagtgcagtgttacctggaaactggtacgacttatattctataaccaccacgttagcagctgggaattcttccagacagggtatgtcgcgccgtctactgttgagtgcaacaaccactgtatacctggtagcgcaggccacctttaccgggacctgcactgcccagggttatattagagctatgagggtaagataatggcaggggcggctaaacgcagtcgcctctcggagctgcaccgcatgttcactgaggccttgattgaagaaatcaagcagtccaaggaagacgaggtgccgctccccgccgcagataaatcggttatcgctaagttcttgaaggacaacgacatcaccgcggacgcagattccgaggagatgcaggaccttcgcgacgagttcgatgacgaactagcggcgcgtagagaggcgcgtaagcaagagattctaaataaagttggtggctcagactctgaggacttactagaaggaattgtataatggtatcggtgaagactgcacgaagactgcgcatgctcaaccagaaacttactggttatagtgcgaatccgcgcagtattcccaaagaggagcgcgaggatatcgccatgatgatggcggctgccctcagtgactttcgggaattcgcatacatcggtatgcgcttccttggttttacgctcacggacatgcaggccgacattgcagagtacatgcagaagggccctaggaagcgcatggtggccgcgcagcgtggtgaggctaagtctacactagctgcgctctacgctgtctggaggctcatacaggaccaatcctgccgtatcctgattgtgtctggtgcagagaagcaggcgtctgatgtagcgaacttaatcattcgtatgctggaaacctggccgctgctgtgctatttgaaggctgaccctactcgtggggaccgtacttcattcgaaggttatgatgtcaactgcgacctgaaacctctggataagtccgccagcgtagcctgtgtaggtatcactgcatccctgcagggtaagcgcgcggacctgctgattccagatgatatcgagaccaccaagaacggtttaacacaaacccagcgcgagcagctgctgatgatttcgaaagactttgcggctatctgtacgcacggggatacgctgtacctgggcacaccacagaccaaggacagtatctataagaccctgccgggacgtggcttcgaggtccgcgtgtggcccgggcgcattccgtctgttgaaatggaggagcgatatggaagtacacttgccccttatatccgggagcttattgagcgcggctataaacgcaccggcttcggcgtcgacgggacgttaggcgagagcactgacaccgggcgctatgacgaggatgcgctgattgagaaggagctggacttcggtccggaaggcttccagctgcagtacatgcttgacaccaccctgtccgaccaaatgcgtacgcgtatcaagctttcggatatgctggtttactccggtagccaggattcctccccggagacattctcctacattgcggaccgccggtacctgtaccagcacgagcatgaggggattatgggccagcagatgtacttcccggcattctacggggacatgcacctgccgtaccagcataaggtgctggtagtagacccggctggttgtggcggagacgaagtgtcctacgctgctggcggcgctgcgaactcgtacattcacctattctccgtaggcggcttccaaggaggtatcagcgaagagaacattgataaactgattgacctgtgcgtagagctagacatcccggatatggtggtggagagcaacatggggcatggcaccgtgtctatgcttatcctgaaccggttacgggagcgacgtctcgccggtatcggtgtacgggatctgaacaactccactcagaaagagcgtcgtatcatcgacacaatcagcccagttactcgtcgtcaccgcctggtagtgcatgagcgtgctattcacgatgatattagtacctgtatggcgtattcccgcgacaggcgttggctgtactctgcgttcgcgcagttgtctggcattacgtacgaccgtggtagtctggctaaggatgaccgcgctgacgcaatcgccatgatggtggctacgctgaacgggcacctggtggaagatgagaaagtggtggctgagcgtgagtctgagaagatggctcgggccttcattgataacccgctggattgggcacagagcaaagtgtctaagggccttcggggtgtagctgcacggttacagaaccggggcagaggtaaacaacatagaggaagaagataatggcatttgcagaagcaacactggcacagcgccaggcagtacgtaatgcagcagtagcacttgataaagcaacaaccttagcacatgatactggcccattagatactctgggtccggatgtagatgcagccggggctgtagcagtagcggcactctctgctgcaggggcctctgacggcggcactgtagtggtggtcagtaatggtgcggaagtaaccgtacccattacgttcaccaccgctcgggaggcagaggctactgccaccgtagcagcgactatcactgtagaagatggtgtaatcacagcaatctctattgagtaaggagtaatactatggcaattgcaaaagcaacctcagcgcaacagcaggagctgctgcgtcagctgaacattctcggtaaggacctgtatgctatccttacgcagccgcagaacgtagcccagactggagccgccttcgacaccaagattgctgcgcttgaagccgcagtagccgcagtgaaggctgctagctaatgcgtaaactggtcgctgggttactgctcgcggttactctgactggttgctcggcgacctctgcactcaccggcttagttggttctaagccggatgtgtctgctcaggttggtgccgaaaacaccaagcaaaccgttggcctgaacaacaaggtggacgccagcaccaccaacaaaaccgatgtatcagattctaacgtaggcaccctggacacgtccagtaagaagcaggtacaaactattagcaccgggacaatccaggcagaacgcctgcaggtggttaacaatgatagttacagtcttatcctcgccggattagctggggccagcattcccctggtcttcctagtggtcattctggtgattcgtaagctattcaggaagaaggggcagcaggatgattaaggtaggagacatggttgggtcggacctcgctacccgggcaggtgcagcagttaccggcgctacggtatcaggaggttggttggcagagttaatgagctggaactggagcactatcagcttcatcactgcgacggtgtgcgcagtgctaaccctggcgtggaatgcgtattacaagcgacgtacattcaagctcctagaggagcaggcacgtaaggggactattaaatatgagtttaaggactaaggttattgcggccctcacgggggccactatgctcggcggtgccattaccggcgtagtccagcacaacgagggcctgagccttaccgcctacaaggatagcgccggtgtccctacaatctgctatggcgagaccaagggcgttaaaatgggccagagagccacgctgagcgattgtcagaagcaactgatacaatcagcaggggaacacgcaaaggcccttgacgggcttcctatgcagctctctgacgtagccctggttgggtctatagacttcatttataacgtaggtgtagctggcttcaatggcagtgccgtgaagcggcatctcaagagccttgattatgcggcagccgggaaggctgtactggactggcgttatattagcaagtaccagcagaagtccccgggcaccggttgggtgtataagggcggcaaccgctggacctttgactgctcccagtatattaacgggcagcgcaatagagtgtgctggggcctatgggagcgcaggcagtggcagagcaaagccatcgggaatcagtataagaacgtaagcacagccctggctgaattgaaacgataagaggggacacatggcactagtagagaacgtacaaacacggtactacagccaagacgatttgtggtgcagagtagctgactacttagcgaaggatgccccggtacttaccggactccgaccggattcttccggcaactacgcagcagctattgagcgggtttccgctaaaggtgtaaaggtgctgcgcgtacctgtggggtcttattatgttggggactgccacctaactaaccctatgctgtttataggtgatggcctagagggcgtcaacccgcttggggctgtattcattaaacctagcacagctgctaagatgttctactttgacggtacaagtacacgtggaactgggggcggattcctcagaatgcgactgcaaggggctgtcagcagtgattcgggacttatggttgaagtcacctcctggagctattttggggcggagaactctgcttttaataacttagcgggatctgcgctggtgttgcgtgactgtatggagagtcacatctcaggaaacttattccgcaggatgggtgcctctaacggcagtgttatactcctaggggattacataggtattcctaataataacgtcaataacctgcacattcagaataacacattcgggttgtgctctggtgcgtggattaagagtacagcaaacagtaacccggacctggtgtggattacggataataagtttgagtgggatagtgtaccgtacggagctaacacaaccacgcagcacgtactggactttggacagctgtcacgctcttggattacccgtaatggttttgcgcacttccgcccagactccgaccataacctgtatgccgggtgtattcgtattaggtctggagctgttggtcctattgttatttctgataacaaggcgtatgggtgcgaaggagaattctggaccattgaaggtggttatgtagatgccttcgacaatgatgcgaacattgcagatgccagcagtgttctatcctggtcactgagtagtactagggcttgccgcatcaacccgcctcgcgtatacagcgggaacatgaacgtagtgcgcggggatagtccgttcggccctgggtttatcgggcaggcgtacatgcgcggggctgccgctgctagtcgtaccactagggctggggctgctagtactgtagcactggatgttcctgcgggtcaggagatgcgtcggtaccagttgccgctgcaccttctcgggtctatagtgcgagtatccttgcgagtctacaaccccggcgctactggtaacataaccttagcagtgggtagtggcggctcctctgttgctgcggtaccggctggtccagggtggttcgatgtagacttttacttgggtaacagcctaactggggacggagatttgcgcttcaccaacagcaccggaaacacactgagcctggatggtattacagtagagcgcgctcgttctgttccatttagctttgcgtggaccccaggtgctgtagctgccggtacgctggtatctagccctgtacagactctcccatacgggattactcaagcccctgtcggtttgagttctccggtatttaacgggtctgttgatgggctgctagccggtgtcagtagctacagtgggtacagctcctacaaagttactctgtttaatcctggggctgctccaattacccccggggctactcgggctagcttggtgctgcacttctaatgcacagcgtaaaacccaggcccagtctaggcgagcaggtctatacctggacctgaaatttattagactcacgcgagcccctccctcaccctcaacgacgccaattgcccccatagggggtacctagcgtcaatttaggggggggggggggcactgggtgggcctgctagtgcgcaccagagggcctcagcgggcctgtgctgcgttctagggctatcgctagtgctaccctatgcctgtccttgtgcgttcactagggcgcttcctgtgcgctctcagtgcgtgctatgaggcgctagggctatccctgtgcgctccctgtgggccataggggcgtgctctgccttgcttattttgtgcgtcacagtgtggcacctagtgggccagctagtgcgctgtagtgctatccctagtgctatccctagtatgcactaggctatccactggctatctttagtgctttacattgtgccgattctatgctacgctgcgcgctccccactagggcgcacttccactacccggcacactccagcgctatccagcgctatccagcgctatcccaatgctatccctttgctcttactttcattcgaaagctattatgaaatgaagtaaccggagtaggaggggtttagggacactatatacactactactcactatgcactccctagtatgtccctgtgcctacgcagtaggctgacatacctacacagtcaccgcatcactacgtggcttcactctcgttacgccactgcgttctgctctttgtagtattagatagtattggctcgtaatggctagcagtggctacagctagtgccagcatagggctatccctgatgtggttctaagtatttaccctgcttaccctttttgctcccggtgataaaaagcttaaaaaagtgcttgcttcttttggttcaatgggtctatagttcaatcaccgggaggcgctgaggtgctaaccggggccgagccgggaggctccgctggattaaagctagatagtgcgaagggttagacactcgataaaaagagttgacaccgcgaagggcataagctagattgagtccaagcagtaactgaatatgtcgtgtaacagtaaatgcgcgattggaaccctaaccacgatagggcgctgagaggctaacagcgagataacccctaagaagtgatgctcatcggagtttagggaaacaggctggttgggaactaccgaataccccgagctggacagccagcaagtagtaagaaataaacgcttgacaagttctgattcactgagtaacttagatagcaagcagtaagctggttcgcggggaggcccagtaccttgactggtacgatgacgaccgagcctagataatcagttaaaaagagtaagcgtgccggacgttatcaccggggttctgaggcaaaccatactgccgaggcgagagcagctcgctcctctgaatcgagggaacaaggcgcggagtgtaccccgcaaagagcatataacatagcgtagcagtaacaaggctgcgctagattatgtactctgagaggtgagattatgcgcaaagcaaaacgcctagcattacggcggaatatgcagttatcacttaaccctaccgataacgtgccgcttactgtgaagcccagcaaacaagggttgagcggtgagcacagggtgaggggaaagcaaaaacaaaagggcggcagtaaacagcctagtgggtggcctactgttaactcccaatttgggcactaattacagcctatagcatcctatggggtgctatgtgaagtaattatctaagcaactagggaggtgccaaatggttggctacggtgaaggttaatagcctatagcgtcctacggggcgctatgtgaaattaaccgatagtaaatcaatcaaagaggtgtattatgacccattcaactggtaaagtattcaagctcaccgctgcgggtagcattcgtaaagcgctgggcgacgtagtggaagcaaagcgtaacatcactatcagcgcgctcttccacggtcttatcagcagcaacgtttcctgggctacggatatgcagcgcagtgacgctgctgactttgatatggtgctgcgtacgctattacccatcaagttcaacaaagagtccggtaagtacgagttcaacgctaagaagtgctatgcgtcggctgagaagctgggaatcgaactggacactatgcgtcttgactacaaacaagctgacaagcagggccgcgaagttattgttgccagcttctatagctcctgtatggccctgtacgctgccgaagcggagcaggtgaagaatgacgcgctggacgctgatgcagtgcgcttgcaagcgctggggcgcgttaaaaacgccattaagaaggccaaagagactggcgtaagcgacgcagatttggtgagtatgctcattaatcagggcgtggatgtacgtgctgtgctggacgcaactttgaaggaagtggcctagtagcaagcctatagcgtcctacggggcgctatgtgaatgcaactggcgtatgaggtttcatatgaaagcaatactggtctatccgggccatgaactctggcccgtgtggtgcaatcggatatacgaagaatacagctacactgtggttatattctctgacaaagacactaatcaggaatcccctttagaatttgtggatacctacaccgaaatggctgcccgcactgtgctggacgccgtgaatcttggcattatcaacgactggagacaactttatggttaacgtgttcaacatcattgtgaccagcgctatgctggtgctgggcaacgacgtaaacaacccggtgccctattgcacagtgcagttgcagcaaccggcggcgcaggaaccgcagccgcgccctgagtatgacctctttgaagaccccgagggtggttgcaaagagctgggcgcgcgtatccttgcggcggtgcaggagcagtacccggacgccgctgtaacgctcacggtggacggtaagagcaacaacgatatttgaggtaaggtatgcacggaaagaatcctgagacgctgctgatgtgtaggcagcaaccaacaatcgaaggactggcgcgagagtacagcgcgaaggcagcgctgcgccagcactacgagaagcaagcgcagcgcctgggtatgaccttgcgaggctactgcctgcgctttaatgtacgaggtgtagtatgaagtatgacgtgtaccgagagacctatagcggtctgtattatctcatccctttagagggggcaattaatgagcgccgcatacttttaacctctgcgggattaatgcggagcagttaccgagcaggtgacgttatcacctctccggcttttgtgttggtgtcacgaaactgcgttcctaagagaagcctatgctaacagtagacgaaacagcgctgctatgctggcgtctgctggaaacgcagggcaagtgcggctgcacttgggaaacattcaaagaggttcctaatgaactcaagcaaatcataccggtcgagcgtagactcctccgtgttcgtaggcaggactctacggtggtgctcaccacgtaccgcgagtatacagagtctgccgcgcggcagttgcaagagcacattaagttcgatgtggttgcagcactgctacggtacggatatcgtggagcctatacaagatttagggcggctgtgcgctcgtattataagcaaagacagctcgctgcgtggtatgcgcgctgacttggcagttaacgacgaactcattgaatctattcaggagcaaattaaaatgcaagagactatcaaagaaactgtcacagcacctatcgaatggaaagtagtgttgccggaaggtgcaaacacactgccaattaaatgttcgatgtattccagcggtgattactggaccccgttccaggacttgcaaatgcaaggtgtagactaccctcacaatgagggtccactgcaggcacttatgggtctacgtactgtcggcatgtacacctcgggtttagaggtaactataggcgggatactgcacccaaaataccgcgaggtgatgagggttagtgggccgttgcaaaaggtggacttgtaccggtccggaactttctacgaactcctttctccggcgcgaatcaccatcgacagcaagttctgggaacgccgccgcgacttctatgagggtgatgatgtagtggttgagcgcgtggttgcgtgcgtggaagagttcaccggctacaaggtgcacaagcaggccgtgcagttattcgagcgcattatgcttgcaccagaagagcggcagcgccgggagtacactggctacaattacggacgccacatccgtgacatgagcgccgcggcgctgctcatgaagttgcacggtttcgtagtgtctagattcgccgtgcctttgggctttggtttccgcaacggtgagcccatcgtgatgctggggcagcctcgaatgcacaaggacttcgccgcagttactgagtaccgctgcgtagagatgcgcgtaggtaagtggctcgctaactactacggaaatggtgtggacttccgcgatgctatcgaagacctcaaggctatgaacgtagaccctaaaacgtacctgtgcaagaccgagcaggaatggtacgacgcctacgagaacggcccgggtagctgcatgagcgggtactcctttgagcatagccctgtgcgggcgtacgctactaccagtcacgggctgccggataatgggctgcgcctgttcatccagtacaccggggagctgttcggtgacgacttcgaagtgcaggcgcgagcaatcgtgaggccagaaactaacgagtatgttcgtgcttatggcaacgctgcggatgcaatcctgcgcggacatgggtacatcagaaacactgagtgtctcgaaggggtaatgctggcgcgtataccacacccgcaacacaccggtgcggtgctgatgccgtacctcgatagcagccagtgcggtgttgatgaagaaggcagtgacgcctttgtaatccgtgatgactacgagtacgaggcgcaagaagccgatggatacatctacgtaggcactgaatctgctcggtgctgctgctgcgaggggcgctactccattgatgatatgcacgaaaccgccgacggtgaaatggtctgcgacggctgcgtcgaagatggggactttgtatatgtagttggccgagaagggctgcataatcgctggagctgcacttggtctgattaccacgacgcctatgtatatgacgcggacattgagcactgttcggtagaaggggtagtgcatgaccaagaagaactggtgtttgcacaggaccggcaggtgcttattgagcacgcagaagaacatccagtgcacgggctaattctcactgaatatgcagccgattgcttgggagagaagtatctgggcaacgacgatgaagaagaagtagaggaggcagcttaatgttcttgaatcctcacgggattgatatgcagctgctcttgcagatactgcaaacgcaccggcctagctgggcaagtaccaagtggttcgagccgctgcttatgcaggcgcttggtagtggtatgcactacgtaaaggacaagcacggaaactacttcgtgctggtgggggactcagagcaaagcgacgtggcatttacgtcgcacctcgatacggtggcccgtccaaccagcgctgcgccggacgtcggctgcactaacaagggtgttctgttcgtaaagaatccgcagcaggctgactgcttaggcgcagactgcggagccggtatctacctgatgctggagatgctgcgacggggcgtgcacggacgctactgcttcttcgtggatgaagaggttggctgcgaaggcagcgctgcatcggtcaatgatgacactgggttttggactggggtcaaggcgatgattagctttgaccggcgcggcgacggaatcattacgcaccaacggtacatgcgctgctgctctgatacctttgccaagatcctagcagagcgcctgggacgcacggagcagcacttacagaagggggtgtacactgactcagccgagttcgttggtatcattcctgagtgcaccaacgtaggtgtagggtacatgcacgagcacaccccggatgaggtactggacctgaacatcctggggcaagtgcttgagcgggtactgcaagatggtacgttctcgcacctaccgattgagcgagacccgaaggtaatggagccagaccaatggctctctgcaccaacgctcagttcacggcagccgtgggacatgcccccggacgaggacccgcaattactggccgcgttccgggaagtgtcacagctatctaaacagcaattggttagctgggtgcaggagaacccagagaaggcggcggagtacatcatggtgttctccgattatggcttcaaacaggagctgattgaactaggcacccgagtcgtagaagactggggcggatacgataatattgtggagggttgattatgtctaagtttaaagttggtgataaagttgttcgcaaagcacacaaaaacacttcgtcgttcaagtcgtacctaggggattttgcttactacgtaattacagatataactacaagcggccactggctgcagttggataactttacagatgggggagccgacccctacccgtggtacgcctataacttcgagctatatcaagacccgaaggatgag

SEQ ID NO: 50 - DNA, 44838 bp, Unknown
  source: /note="Description of Unknown: KP2M-P0210 Bacteriophage sequence"
attatggcataccagttcccgttgatgctgctggctactatggctaagcatggcatggatgggaaggacgtagacacccagaaactcatcagtgagtccgtaacgggtatgagtgccatcggcggggtatccttactgcaggatatcttcctgggggattctccccgccactcgttggcgtctatgggttatgtcacagggctgctcggggccgtacaggacctggctactggtaatatggacatcaagaccttcactaagcaggtaccgttaatccaggaattcgcacctacgcgagctatcatcaataacttcggagacgattaatatggcgttcagctggcaagaacaaatcaagccagctggtacccaggatatccagtgcgatattgagtatttggacaagtcctatattcatgtatacctagacggagaggaaaccactgggtacacctggaccagctctactaatatcaggctgaacacagccttaacggcggacactacggtgctgctcattcgcaagactgagcgggagtacttgtatattgagttcgccagcggctctccgttcattgaggtgaacgtagattctcaaaacacgcaattcttacacctagcccaagagcttgtggaaggccgagctatccccggattctacgggaatataagcatgaacgggtaccgcatcactaacgtagcggacccagaagacctgcaggatgtggcaaccaagaactatgtagatactggtgatgcggcactaggtgtccgtattgatgccgaagccgccgcgcgcaaagccgcagacgatgcgctcgatgttcgtactaccaacctagagcagacctttatctcgggggagcctacggtaagctatccctggtatactatactggccgaggctactgacgaagttacgcctggattgtctttcacaaaggctatagtgtacgtacaaggcgtaaatcagattccgggctacagttttgaggtggtggataacactctactgtttgcagaggtacttccagctggtactctagtgtctgccagattggggtatgatgcagagctttcggaaacttacgctacagctacggcattaggggaagaggcgtcagccagggctaatgccgatgcacagataattctggattaccaagcagcagtagcgaccaaggcagcaaagggtgctaactctgatatcacgagcttaagtggattaactacaccgctgagtaaagctcaaggcggtactggcaacactactggtgccgctgattcagctgcgaagctagccacagcaaggactttggtggtagatttgacatccactacaccggccagttttgatggttctggcaatgccaccttaggggcaactggcagccttccaattacaaaggggggcaccggagctggcgatgccgccactgctaggactaacctgggagcagcggcgtccggcagcaacggagacatcaccgcattaacaggattgagtgggggtatatccggccgcactgacggtgcagctgcagccgccggtgtagtgggggaagtactgagtgccgcaacctctgcagccgtaagtgttaccagcggcaccccattgaacgttctgtccttgagcctgccggcgggggagtacgagcttgagagtgccctgttagtcactaatagcggcaacgttactgctctcagttttggagttagtagcaccagtgcagtgttacctggaaactggtacgacttatattctataaccaccacgttagcagctgggaattcttccagacagggtatgtcgcgccgtctactgttgagtgcaacaaccactgtatacctggtagcgcaggccacctttaccgggacctgcactgcccagggttatattagagctatgagggtaagataatggcaggggcggctaaacgcagtcgcctctcggagctgcaccgcatgttcactgaggccttgattgaagaaatcaagcagtccaaggaagacgaggtgccgctccccgccgcagataaatcggttatcgctaagttcttgaaggacaacgacatcaccgcggacgcagattccgaggagatgcaggaccttcgcgacgagttcgatgacgaactagcggcgcgtagagaggcgcgtaagcaagagattctaaataaagttggtggctcagactctgaggacttactagaaggaattgtataatggtatcggtgaagactgcacgaagactgcgcatgctcaaccagaaacttactggttatagtgcgaatccgcgcagtattcccaaagaggagcgcgaggatatcgccatgatgatggcggctgccctcagtgactttcgggaattcgcatacatcggtatgcgcttccttggttttacgctcacggacatgcaggccgacattgcagagtacatgcagaagggccctaggaagcgcatggtggccgcgcagcgtggtgaggctaagtctacactagctgcgctctacgctgtctggaggctcatacaggaccaatcctgccgtatcctgattgtgtctggtgcagagaagcaggcgtctgatgtagcgaacttaatcattcgtatgctggaaacctggccgctgctgtgctatttgaaggctgaccctactcgtggggaccgtacttcattcgaaggttatgatgtcaactgcgacctgaaacctctggataagtccgccagcgtagcctgtgtaggtatcactgcatccctgcagggtaagcgcgcggacctgctgattccagatgatatcgagaccaccaagaacggtttaacacaaacccagcgcgagcagctgctgatgatttcgaaagactttgcggctatctgtacgcacggggatacgctgtacctgggcacaccacagaccaaggacagtatctataagaccctgccgggacgtggcttcgaggtccgcgtgtggcccgggcgcattccgtctgttgaaatggaggagcgatatggaagtacacttgccccttatatccgggagcttattgagcgcggctataaacgcaccggcttcggcgtcgacgggacgttaggcgagagcactgacaccgggcgctatgacgaggatgcgctgattgagaaggagctggacttcggtccggaaggcttccagctgcagtacatgcttgacaccaccctgtccgaccaaatgcgtacgcgtatcaagctttcggatatgctggtttactccggtagccaggattcctccccggagacattctcctacattgcggaccgccggtacctgtaccagcacgagcatgaggggattatgggccagcagatgtacttcccggcattctacggggacatgcacctgccgtaccagcataaggtgctggtagtagacccggctggttgtggcggagacgaagtgtcctacgctgctggcggcgctgcgaactcgtacattcacctattctccgtaggcggcttccaaggaggtatcagcgaagagaacattgataaactgattgacctgtgcgtagagctagacatcccggatatggtggtggagagcaacatggggcatggcaccgtgtctatgcttatcctgaaccggttacgggagcgacgtctcgccggtatcggtgtacgggatctgaacaactccactcagaaagagcgtcgtatcatcgacacaatcagcccagttactcgtcgtcaccgcctggtagtgcatgagcgtgctattcacgatgatattagtacctgtatggcgtattcccgcgacaggcgttggctgtactctgcgttcgcgcagttgtctggcattacgtacgaccgtggtagtctggctaaggatgaccgcgctgacgcaatcgccatgatggtggctacgctgaacgggcacctggtggaagatgagaaagtggtggctgagcgtgagtctgagaagatggctcgggccttcattgataacccgctggattgggcacagagcaaagtgtctaagggccttcggggtgtagctgcacggttacagaaccggggcagaggtaaacaacatagaggaagaagataatggcatttgcagaagcaacactggcacagcgccaggcagtacgtaatgcagcagtagcacttgataaagcaacaaccttagcacatgatactggcccattagatactctgggtccggatgtagatgcagccggggctgtagcagtagcggcactctctgctgcaggggcctctgacggcggcactgtagtggtggtcagtaatggtgcggaagtaaccgtacccattacgttcaccaccgctcgggaggcagaggctactgccaccgtagcagcgactatcactgtagaagatggtgtaatcacagcaatctctattgagtaaggagtaatactatggcaattgcaaaagcaacctcagcgcaacagcaggagctgctgcgtcagctgaacattctcggtaaggacctgtatgctatccttacgcagccgcagaacgtagcccagactggagccgccttcgacaccaagattgctgcgcttgaagccgcagtagccgcagtgaaggctgctagctaatgcgtaaactggtcgctgggttactgctcgcggttactctgactggttgctcggcgacctctgcactcaccggcttagttggttctaagccggatgtgtctgctcaggttggtgccgaaaacaccaagcaaaccgttggcctgaacaacaaggtggacgccagcaccaccaacaaaaccgatgtatcagattctaacgtaggcaccctggacacgtccagtaagaagcaggtacaaactattagcaccgggacaatccaggcagaacgcctgcaggtggttaacaatgatagttacagtcttatcctcgccggattagctggggccagcattcccctggtcttcctagtggtcattctggtgattcgtaagctattcaggaagaaggggcagcaggatgattaaggtaggagacatggttgggtcggacctcgctacccgggcaggtgcagcagttaccggcgctacggtatcaggaggttggttggcagagttaatgagctggaactggagcactatcagcttcatcactgcgacggtgtgcgcagtgctaaccctggcgtggaatgcgtattacaagcgacgtacattcaagctcctagaggagcaggcacgtaaggggactattaaatatgagtttaaggactaaggttattgcggccctcacgggggccactatgctcggcggtgccattaccggcgtagtccagcacaacgagggcctgagccttaccgcctacaaggatagcgccggtgtccctacaatctgctatggcgagaccaagggcgttaaaatgggccagagagccacgctgagcgattgtcagaagcaactgatacaatcagcaggggaacacgcaaaggcccttgacgggcttcctatgcagctctctgacgtagccctggttgggtctatagacttcatttataacgtaggtgtagctggcttcaatggcagtgccgtgaagcggcatctcaagagccttgattatgcggcagccgggaaggctgtactggactggcgttatattagcaagtaccagcagaagtccccgggcaccggttgggtgtataagggcggcaaccgctggacctttgactgctcccagtatattaacgggcagcgcaatagagtgtgctggggcctatgggagcgcaggcagtggcagagcaaagccatcgggaatcagtataagaacgtaagcacagccctggctgaattgaaacgataagaggggacacatggcactagtagagaacgtacaaacacggtactacagccaagacgatttgtggtgcagagtagctgactacttagcgaaggatgccccggtacttaccggactccgaccggattcttccggcaactacgcagcagctattgagcgggtttccgctaaaggtgtaaaggtgctgcgcgtacctgtggggtcttattatgttggggactgccacctaactaaccctatgctgtttataggtgatggcctagagggcgtcaacccgcttggggctgtattcattaaacctagcacagctgctaagatgttctactttgacggtacaagtacacgtggaactgggggcggattcctcagaatgcgactgcaaggggctgtcagcagtgattcgggacttatggttgaagtcacctcctggagctattttggggcggagaactctgcttttaataacttagcgggatctgcgctggtgttgcgtgactgtatggagagtcacatctcaggaaacttattccgcaggatgggtgcctctaacggcagtgttatactcctaggggattacataggtattcctaataataacgtcaataacctgcacattcagaataacacattcgggttgtgctctggtgcgtggattaagagtacagcaaacagtaacccggacctggtgtggattacggataataagtttgagtgggatagtgtaccgtacggagctaacacaaccacgcagcacgtactggactttggacagctgtcacgctcttggattacccgtaatggttttgcgcacttccgcccagactccgaccataacctgtatgccgggtgtattcgtattaggtctggagctgttggtcctattgttatttctgataacaaggcgtatgggtgcgaaggagaattctggaccattgaaggtggttatgtagatgccttcgacaatgatgcgaacattgcagatgccagcagtgttctatcctggtcactgagtagtactagggcttgccgcatcaacccgcctcgcgtatacagcgggaacatgaacgtagtgcgcggggatagtccgttcggccctgggtttatcgggcaggcgtacatgcgcggggctgccgctgctagtcgtaccactagggctggggctgctagtactgtagcactggatgttcctgcgggtcaggagatgcgtcggtaccagttgccgctgcaccttctcgggtctatagtgcgagtatccttgcgagtctacaaccccggcgctactggtaacataaccttagcagtgggtagtggcggctcctctgttgctgcggtaccggctggtccagggtggttcgatgtagacttttacttgggtaacagcctaactggggacggagatttgcgcttcaccaacagcaccggaaacacactgagcctggatggtattacagtagagcgcgctcgttctgttccatttagctttgcgtggaccccaggtgctgtagctgccggtacgctggtatctagccctgtacagactctcccatacgggattactcaagcccctgtcggtttgagttctccggtatttaacgggtctgttgatgggctgctagccggtgtcagtagctacagtgggtacagctcctacaaagttactctgtttaatcctggggctgctccaattacccccggggctactcgggctagcttggtgctgcacttctaatgcacagcgtaaaacccaggcccagtctaggcgagcaggtctatacctggacctgaaatttattagactcacgcgagcccctccctcaccctcaacgacgccaattgcccccatagggggtacctagcgtcaatttaggggggggggggcactgggtgggcctgctagtgcgcaccagagggcctcagcgggcctgtgctgcgttctagggctatcgctagtgctaccctatgcctgtccttgtgcgttcactagggcgcttcctgtgcgctctcagtgcgtgctatgaggcgctagggctatccctgtgcgctccctgtgggccataggggcgtgctctgccttgcttattttgtgcgtcacagtgtggcacctagtgggccagctagtgcgctgtagtgctatccctagtgctatccctagtatgcactaggctatccactggctatctttagtgctttacattgtgccgattctatgctacgctgcgcgctccccactagggcgcacttccactacccggcacactccagcgctatccagcgctatccagcgctatcccaatgctatccctttgctcttactttcattcgaaagctattatgaaatgaagtaaccggagtaggaggggtttagggacactatatacactactactcactatgcactccctagtatgtccctgtgcctacgcagtaggctgacatacctacacagtcaccgcatcactacgtggcttcactctcgttacgccactgcgttctgctctttgtagtattagatagtattggctcgtaatggctagcagtggctacagctagtgccagcatagggctatccctgatgtggttctaagtatttaccctgcttaccctttttgctcccggtgataaaaagcttaaaaaagtgcttgcttcttttggttcaatgggtctatagttcaatcaccgggaggcgctgaggtgctaaccggggccgagccgggaggctccgctggattaaagctagatagtgcgaagggttagacactcgataaaaagagttgacaccgcgaagggcataagctagattgagtccaagcagtaactgaatatgtcgtgtaacagtaaatgcgcgattggaaccctaaccacgatagggcgctgagaggctaacagcgagataacccctaagaagtgatgctcatcggagtttagggaaacaggctggttgggaactaccgaataccccgagctggacagccagcaagtagtaagaaataaacgcttgacaagttctgattcactgagtaacttagatagcaagcagtaagctggttcgcggggaggcccagtaccttgactggtacgatgacgaccgagcctagataatcagttaaaaagagtaagcgtgccggacgttatcaccggggttctgaggcaaaccatactgccgaggcgagagcagctcgctcctctgaatcgagggaacaaggcgcggagtgtaccccgcaaagagcatataacatagcgtagcagtaacaaggctgcgctagattatgtactctgagaggtgagattatgcgcaaagcaaaacgcctagcattacggcggaatatgcagttatcacttaaccctaccgataacgtgccgcttactgtgaagcccagcaaacaagggttgagcggtgagcacagggtgaggggaaagcaaaaacaaaagggcggcagtaaacagcctagtgggtggcctactgttaactcccaatttgggcactaattacagcctatagcatcctatggggtgctatgtgaagtaattatctaagcaactagggaggtgccaaatggttggctacggtgaaggttaatagcctatagcgtcctacggggcgctatgtgaaattaaccgatagtaaatcaatcaaagaggtgtattatgacccattcaactggtaaagtattcaagctcaccgctgcgggtagcattcgtaaagcgctgggcgacgtagtggaagcaaagcgtaacatcactatcagcgcgctcttccacggtcttatcagcagcaacgtttcctgggctacggatatgcagcgcagtgacgctgctgactttgatatggtgctgcgtacgctattacccatcaagttcaacaaagagtccggtaagtacgagttcaacgctaagaagtgctatgcgtcggctgagaagctgggaatcgaactggacactatgcgtcttgactacaaacaagctgacaagcagggccgcgaagttattgttgccagcttctatagctcctgtatggccctgtacgctgccgaagcggagcaggtgaagaatgacgcgctggacgctgatgcagtgcgcttgcaagcgctggggcgcgttaaaaacgccattaagaaggccaaagagactggcgtaagcgacgcagatttggtgagtatgctcattaatcagggcgtggatgtacgtgctgtgctggacgcaactttgaaggaagtggcctagtagcaagcctatagcgtcctacggggcgctatgtgaatgcaactggcgtatgaggtttcatatgaaagcaatactggtctatccgggccatgaactctggcccgtgtggtgcaatcggatatacgaagaatacagctacactgtggttatattctctgacaaagacactaatcaggaatcccctttagaatttgtggatacctacaccgaaatggctgcccgcactgtgctggacgccgtgaatcttggcattatcaacgactggagacaactttatggttaacgtgttcaacatcattgtgaccagcgctatgctggtgctgggcaacgacgtaaacaacccggtgccctattgcacagtgcagttgcagcaaccggcggcgcaggaaccgcagccgcgccctgagtatgacctctttgaagaccccgagggtggttgcaaagagctgggcgcgcgtatccttgcggcggtgcaggagcagtacccggacgccgctgtaacgctcacggtggacggtaagagcaacaacgatatttgaggtaaggtatgcacggaaagaatcctgagacgctgctgatgtgtaggcagcaaccaacaatcgaaggactggcgcgagagtacagcgcgaaggcagcgctgcgccagcactacgagaagcaagcgcagcgcctgggtatgaccttgcgaggctactgcctgcgctttaatgtacgaggtgtagtatgaagtatgacgtgtaccgagagacctatagcggtctgtattatctcatccctttagagggggcaattaatgagcgccgcatacttttaacctctgcgggattaatgcggagcagttaccgagcaggtgacgttatcacctctccggcttttgtgttggtgtcacgaaactgcgttcctaagagaagcctatgctaacagtagacgaaacagcgctgctatgctggcgtctgctggaaacgcagggcaagtgcggctgcacttgggaaacattcaaagaggttcctaatgaactcaagcaaatcataccggtcgagcgtagactcctccgtgttcgtaggccggactctacggtggtgctcaccacgtaccgcgagtatacagagtctgccgcgcggcagttgcaagagcacattaagttcgatgtggttgcagcactgctacggtacggatatcgtggagcctatacaagatttagggcggctgtgcgctcgtattataagcaaagacagctcgctgcgtggtatgcgcgctgacttggcagttaacgacgaactcattgaatctattcaggagcaaattaaaatgcaagagactatcaaagaaactgtcacagcacctatcgaatggaaagtagtgttgccggaaggtgcaaacacactgccaattaaatgttcgatgtattccagcggtgattactggaccccgttccaggacttgcaaatgcaaggtgtagactaccctcacaatgagggtccactgcaggcacttatgggtctacgtactgtcggcatgtacacctcgggtttagaggtaactataggcgggatactgcacccaaaataccgcgaggtgatgagggttagtgggccgttgcaaaaggtggacttgtaccggtccggaactttctacgaactcctttctccggcgcgaatcaccatcgacagcaagttctgggaacgccgccgcgacttctatgagggtgatgatgtagtggttgagcgcgtggttgcgtgcgtggaagagttcaccggctacaaggtgcacaagcaggccgtgcagttattcgagcgcattatgcttgcaccagaagagcggcagcgccgggagtacactggctacaattacggacgccacatccgtgacatgagcgccgcggcgctgctcatgaagttgcacggtttcgtagtgtctagattcgccgtgcctttgggctttggtttccgcaacggtgagcccatcgtgatgctggggcagcctcgaatgcacaaggacttcgccgcagttactgagtaccgctgcgtagagatgcgcgtaggtaagtggctcgctaactactacggaaatggtgtggacttccgcgatgctatcgaagacctcaaggctatgaacgtagaccctaaaacgtacctgtgcaagaccgagcaggaatggtacgacgcctacgagaacggcccgggtagctgcatgagcgggtactcctttgagcatagccctgtgcgggcgtacgctactaccagtcacgggctgccggataatgggctgcgcctgttcatccagtacaccggggagctgttcggtgacgacttcgaagtgcaggcgcgagcaatcgtgaggccagaaactaacgagtatgttcgtgcttatggcaacgctgcggatgcaatcctgcgcggacatgggtacatcagaaacactgagtgtctcgaaggggtaatgctggcgcgtataccacacccgcaacacaccggtgcggtgctgatgccgtacctcgatagcagccagtgcggtgttgatgaagaaggcagtgacgcctttgtaatccgtgatgactacgagtacgaggcgcaagaagccgatggatacatctacgtaggcactgaatctgctcggtgctgctgctgcgaggggcgctactccattgatgatatgcacgaaaccgccgacggtgaaatggtctgcgacggctgcgtcgaagatggggactttgtatatgtagttggccgagaagggctgcataatcgctggagctgcacttggtctgattaccacgacgcctatgtatatgacgcggacattgagcactgttcggtagaaggggtagtgcatgaccaagaagaactggtgtttgcacaggaccggcaggtgcttattgagcacgcagaagaacatccagtgcacgggctaattctcactgaatatgcagccgattgcttgggagagaagtatctgggcaacgacgatgaagaagaagtagaggaggcagcttaatgttcttgaatcctcacgggattgatatgcagctgctcttgcagatactgcaaacgcaccggcctagctgggcaagtaccaagtggttcgagccgctgcttatgcaggcgcttggtagtggtatgcactacgtaaaggacaagcacggaaactacttcgtgctggtgggggactcagagcaaagcgacgtggcatttacgtcgcacctcgatacggtggcccgtccaaccagcgctgcgccggacgtcggctgcactaacaagggtgttctgttcgtaaagaatccgcagcaggctgactgcttaggcgcagactgcggagccggtatctacctgatgctggagatgctgcgacggggcgtgcacggacgctactgcttcttcgtggatgaagaggttggctgcgaaggcagcgctgcatcggtcaatgatgacactgggttttggactggggtcaaggcgatgattagctttgaccggcgcggcgacggaatcattacgcaccaacggtacatgcgctgctgctctgatacctttgccaagatcctagcagagcgcctgggacgcacggagcagcacttacagaagggggtgtacactgactcagccgagttcgttggtatcattcctgagtgcaccaacgtaggtgtagggtacatgcacgagcacaccccggatgaggtactggacctgaacatcctggggcaagtgcttgagcgggtactgcaagatggtacgttctcgcacctaccgattgagcgagacccgaaggtaatggagccagaccaatggctctctgcaccaacgctcagttcacggcagccgtgggacatgcccccggacgaggacccgcaattactggccgcgttccgggaagtgtcacagctatctaaacagcaattggttagctgggtgcaggagaacccagagaaggcggcggagtacatcatggtgttctccgattatggcttcaaacaggagctgattgaactaggcacccgagtcgtagaagactggggcggatacgataatattgtggagggttgattatgtctaagtttaaagttggtgataaagttgttcgcaaagcacacaaaaacacttcgtcgttcaagtcgtacctaggggattttgcttactacgtaattacagatataactacaagcggccactggctgcagttggataactttacagatgggggagccgacccctacccgtggtacgcctataacttcgagctatatcaagacccgaaggatgagctgccgccagtcccggacaaggtggcctacatgaactctaagcgcgacccgggaaatgaccaacgcctagttcttgagaaggataatggggatggggaaggtttaatgtacatcggggtagttcctaagaagggaagcactcgggcaaaggttgagattgggattaacatcgaccccgattcagccctgcagttggcacacgacctgcgccgcatggctatgtcggttaagcgcgagcagaagtaatggaccagccctggcttagagcgtgcaagcgcctggccgtggggcagagggcgcgctttcggtgctgcggcagggacgccgccggggtgctctacaataacccggatgcctgggaatactattgccaccgctgcaagcaagtgggcaaggagcacaagcagtaccagcgcatacagttacaggaagagccgagggtgcagccctctgcacctgcagatgcaatttgcattagccaagcgcctgcggaaacgcagagttttatttacggattcctgaccacaaagggaatcatgcctgaaatggtggaggatgcagaatggagcaaagagaaacagcggataatcttccgtgtcggaagcgctgctctgggccgtgcagtgcatgcccgacagcaaccgaagtgggtaatgtacggccagccaataccgttcgctgccgcggcacctgccgcagcaccggctgtagctgcggccgcacctctaaaggtcgtgctcaccgaggactatctatcagcgatcaaatatcagcacgcgattacgaactactctgcaatgaacgtgcaggctatagctatgctgggtactcgcttgcccgtgcagttaagggcgtggctgatacagaacaaaccgacagtgatactgtccatggataatgaccaagcgggacactccggcgcggccatgatacgccgtgcgctacgtccctttatgtcgtgccacgaaatctactacgacggggacccaaaagaggcaacaatacaggagttattagatggtattaggcgcgtgtaaagagcacaaacagaaaggcggaccaaagggttacggaaataccacgttcaaagggcggaagatacctctgcatagaaaggtgtgttgctcggcgaacgatatatctccggagagcatagcggggctagttgtgcgccataagtgtgacaacccgagatgtattaatcccgagcatttagaattaggtacggtcaaggataacgtccatgactgtattgccaggggtagggctagacgtggagtttctaaaggggagcagaatgggtactccaagctaacagcgcagcaggtggactatatcaggaagacctacaggcggtacagcagggaacacggcacaccggccatagctgctagccttggtgtaagtgtgtcagcagtgcacgatgtattgaaagctaaaacttggaggctctaattggatctaatagttgtgcgtgcaatgtgcacgcagaaggtgtggaaccggctgcgagagcagatacccaagtctatgcttgcgccggacacttcgaaccttctggactgggtggggttgtactggaacacttacccggagcaccaggaggtgcaatgggatgcgatgcagagcatgctcaacctccgggcggggcacttgtcccgggaagagagggtaatcatggacgagcttatgcggggagtacaagccgtgccgcaggattctgtggtgggcattgtccagaccctgaatgagctggcctacagcggggaggtagcagcgctgacgcagcgctaccaagatggcgaggaggttgattaccttctggagatgaagcacttgcagcgcaagtacggggacggcgctgctgttcatgattcgctgcttgaatgggagagcggaagtgttgatgaaatacttgccgcgactgacgagagcggcggtcttaaactgggcgtgttcgagcaactcgctagcagcatccgaggcttacgcggcggggactgcatcgcagtggctgctcctgtggactctggtaaaactagcctgcttgctgctattgctgtggactttgctgagcagatgcagcagcagccggaagtatacggggaccgccctatcctctggttggttaacgagggcccagcgacgcgcacagtgccgagggtatatcaagcggcgctgcattggactctggcggagattaaggaccggcacagtaagcaagagttcgtgccagcctacctcaagaaagtaggcagggctgaccggattcgtgtcaaggctgcgcactcattgacgatggcgcagatatccacgctcatggaggagatgcgccccgcggtaatcatcatcgacatggtggcgaatatccgtggcggcactatggagagtgagcaccagaaccttgaggcgaaatggcaggagctgcgtatccttgggtgcgagaacgactgcgctattgtaggcactatgcaactttcactcgaaggttacaacatgctgttcccgccactcaccgctatgaagcagagcaagattggcgtgcagggtgccttggacttggcgattatgatgggatgcttggacaggaacgagcagccgcacatgcaaaacgtccgtggtatcagtactccgaagaacaagatggcactgtctggtaaagaatcgctcctgcaattcgaggtgggattcgagccgggtcgttgtagatttgatgagggccaaattaatgtctaagtttaaagttggcgataaagtaaagcgcagcaccgttgtgccgcgtgatatattctaccgcactggcgtgaagattggcaggacttacactgtgtgcgccgtaagtgaaagcggcgcctacataggactgactgaatctaaggagagcacattcaactttgatgcttatgcgttctctcttgtatccaccggtgctgcttgggacgtaaacgaagcactgcgcctgcgcgggttggcagtacaagcgatacaggagtacaacacttacctactgcagcagccgctgctggaggctatcgaacctccgccaccaatcaagtgacttccctagcgccttctacgagggcgctatgtaggtacacaggagggtttatgcaagtagactatacaggggttatccaaaaagcggattacacaggacttatacgcggtagttacgtggtgcgacaccgcgttaccggggaattttgtaccgtggaactcggggcacgttacaatcagagagagtgggatattgtagggcctatatcactgctgggagatttactagtatgcttaaaccgtcagacatcaactacctagacgacgaggtaatcaaggcgtacgctgcatctgcaggtactttccgtaaacgattcgcactggacagcagccagctgattgtgcatctggctatcaacaaggctcggagggctaagtggaaatgaattgggatatttggtttacctacaaagacggcaaactctactggaagcacgaggttagaagtgggcgcggacgcagccacctaaactgcgccgcaggttccgaggcaggaactctgaacaaagtacatggatactggtacgttaagctgcataataagctatacaaaagaagtttgatagtatatgagatgcacaacggtccgctgcgagcaggccaccatatagaccacataaatcataacaggttagaagataccccagataacttgagggcagtgcttcctgagaagaacatgcagaacaagtccctatatagaagcaaccgcagcggctatgtaggggtgcacaggaagagaggtcgttggatagcaaccctaggaaataaacaattaggttcatttagcagtatagagcaagccgtagagtgtcgtagactggcagctgaggcggcggggtatcaccataatcacggggttgcagtatgactagcagtattatgactatagaccttgaggtcgagaataatccttactatggtagcaaggctagcccctactgccctgacaactatgtagtgcattcggcctaccgcatagaccggaccgaggatgacggcacagttaccgtagaaccgacctttgatatcagattcaacagcaagcaggaattccttgacgacgtagccggggagcatctgtggttccgcataccttctgattgctggtgcatcgtggcccacaacgcagccttcgaaattagctggtttttaacatatcagcggcaacactttgaggaattcctaaagcgcggcggccgcgtattcgacacaatgcacggggagtatattgtgtctgactttcagagtatgtacccatccttggatgaaactgcgccaaagtatggtggggagcataagattgatggggtaaaaatattgtgggaacagggtgttctgacctcgcagatagaccccattcttctcagggattacctagtcaatggtgatataaagaacacggccctgtgcttctacggccagtgtgctacgttcacccagcgcaatcagatgcagtacgtgtgggagcgtatggatgccttgctggcttgggcgtactgcgaatggttcggcctgttcgttaatatgccaattgcgcgcaagaaccaggaggagcaggagcagcgcatctgtgagattaagcaggagctgcagcagtatatcccgaaggacctaccggagactctggatttcaacttcggctcggactttcatatgtctgcactggtgtacggcgggcctatcaagtatcgcaagaaggtgccctatgaccctccccagtacgtcaaggccgactactggcaagtcggggacacttgggttgccgtggatgacgtgcccgcaccgccaggtgcaaccacgtacaagtccggtaagaacaaggggctaccaaaagtattccgccttgatacagaggaggagaaacttaagtgggaggatgacctttacttctgcccgggcctagtgaacatccaggagctgccggaagttatccgggagaagtatgcggagcgtggagagttccgacaggcgcgcaccctgcaggacggtacgccagtatacagcaccagcacagacgcaatggaggcgctggcccgccaagggttcgagttctgtaagttggtgaatgagctggcggcgcttgagaaggacaccggtacctactatttacgggaagttctggatgcaaacggagaagtcaaagagcggaagggaatgctgcagtacgtaatacccgaacgcccagatggttccggtatcatacaccaccggctgaatacttgtgccactgtaaccgggcgccttagtagttctaacccgaacctgcagaacctaccccgcccggatgaggacggggatggggtggctaaatccaaggtgaagcaggtattcaccagccgattcggtgataacggccgcatcactgaggttgactactctgcgctggaagtggttatgtcctgcgtgcatacaggggataagaaactgctgggcttgctacaggcaggtacggatatgcactgttaccgcctcgctttccgcgagggactgccgtatgaagaagtatatgagcgctgccacaacaagaagcacgagctgcatccgctttggaaggcaatgcgtacaagtattaaggctcctagctttgcagcccagtatggcgctacggctaaggggattgcgtttgctactggatgtacggtggaatttgcacaggctttcttggacaacgaggctgcgctgttcccgcaaacaattggcttccgcgctgttgttaaggaagaggtagagcgtaccggtgcggagggtcgcatgtaccgggagcaggcggacgacggcagctatcgaatctaccgcattgggacgtggaccagccctgctggtgcccgctacagcttccgtcagaaagagcagtggaaggaggttgtgcctgggcagcgtaagcagaaggtcatggactacaaggaaaccgagatggcgaactactggtgccaaggggaagcattcttcctgatggcggtggcggctggtatggttctgcgtgcactcttggcccgtgactggttcgacaatcaggtgtgcctgattacgaacgtacacgatgcattgtatctggacagcgccaacccggaggttggacgtgaggcgagcctgctggttaagcagtgcatggaggatgcacctaagcgtatccaccagctctggcctaactacggtatcattggcgaggtgcccttcccggcggaagctgaaatgggtacgagcatgtacagtaaggagaaggtagaatgaatattaaacctggcagtattgtggagatgctggaacttgggccggagcctatcgacccacgacatcgtgcctactttgcaccgggtacgcagcatcgcgtgatatcttacgacgttgaattcggcgaggtggagctactcaatccggacagcaactcagagaagcctggggacggcatcaccttcttcgctggagagtacaagctcatcgcggagtagtgataggtggacccttgggtggtgtagggggttagggtagcatggaaatatgctagggtcaactaaataattaaataaaattatttgttgactctggcttgattctgtgattccccgagaattaatgtgatacgagtaggaacaacacaagagaggcaaccttggctaaagtaagtctaatcaaactgtggaccaaagaagagcaccaacaaattcttggcagtttcctaaataacactgatgcagctattgcgtacaataacaaatttcgcaggggggacgtaatcgtgtctcgccagcttgtacgctactggcgcagcatcttcatggataacaagggcagcaaggccagtgccaaccgcgggctgcaggaggcgcgtaagctaatccaaccaagcccaacggacgatatcgggaatacaaaggtgccggatatgtgccaccgcattctggttgtcggggacctgcacgctccgtatacccacgtagacgcaatgccgttccttgagagcgtacgtgatgcgtactgcccggacatggtagtgcaggtgggtgacgaaaccgacgggcacgctatcagcttccacgactctgaccctaacctggatagcgcaggggtggagctggagaaagccaagctcgtactggaggagctgcatgaactattcccgaacctgctggtttgcgattccaatcacggctcactcgtatatcgccgcgctaaagctcacggtttgccagtgcaatttatcaagaagtaccgggacatcttattccctgagcatggtgctccggcgtggtcgtgggccgacgcttgggtgctcaacacaccgctggggcctgtccgtttccagcatcaagtcagcggtgatttcatgcgcaatgcatcccatgagcgcacctctctggtgttggggcatgagcatggacgcttcgaggttcagtatgctgcttcttcaacggcgctgtactttggtgcgtatgcagggtgcttgattgaccgcaagagcatggcctttgcttatggcagactcacccgcaagaaaccaatcctgggtgtgatggtaatcaccgagggttgcccgcagttaattccgatgctgctcgacgacgatggtcgttgggtagggagaagcaaatgaatgtactggattcaactgtcacccgagtagatgctcctgtatgggatgagcaataccaggtgtatcgtgtaaccctggagtatgactgctgggggcacaaatctgagacagagcggtggtataaagatgaagcctcagctcttagtttaaaagttggtgacataatcaaaacctaattaggagtgtcgatgaaaatgggaatctgttctgtactgggccttatctttgtaaccctgaaactgactggcgttatcgcctggtcctggtggtgggtactgcttccgttctacggcggtgtagctttgctgttggcaatcctggcggcaggcggtgtggcagcagccgcggctgcaggcattaaatccgcacttaagaatcgctaggccggacctgcatctgcacgtaaatatcatttaaactaaacgaggacgtaattatatgactacgaatgtactggcatccctgaacgctctggtagacgcagcaatcgaaacccaagatgtggatatgcgggaaaccgcacagggtggtgcgtacgaggacgtgctgctgccgaagggtgaatattacggttacttcaccgagtatgtggaaatcggtaagcgcctgccgaccaagggtggtaagcctaccggtaagcctgcagtggctaacgtacgtatcggcattgtagtgttcggccccaacggcgaagtgaagcgtatccgcccgtacccgatggctatcagtaactttgagcgagcaggcttcaagaagttcttcgacaagctcaactacgacaatagcattaagcatgcagcgcagcgtctgggccaggccttcaccttcccgattgatgagcacaccagcgccgcgggtaagaagtcgaacatcgtggacctgtccggtatccgcccgattcctaagttcgacccgaacaccggtgaacctattaagatgccagcgctggatgcctccgagattaagctgttcctgtggaacaacccaaccaaagagacctgggacagcctacacatcgaaggcaccttcgacgacggtaagagcaagaactggattcaggaggatatgtacaaggccgtagacttcccgggcagtgctctggatattatgctgaacgctggctctgttccgagtccggcagctatgcaggcacctgctgctccttctgcaccggcggctcccgctgcgccggcagccccagctgctccagtggctcctgcggctcctgtagcgcctgtagctccagcagcgcccgctgcacctcaagcctaataaaccctaatcgaaactaatacggcccctcctggggccttagaggaagcctatgaacatcatcaacatccttatcaaactcctgagtgcagcctacacagcagaagctaaacgagcagatgccaaagcgcagtttaacgagcagctgtcagttaaattcgcagacgacgcagtacgtctggccgctcaatccgaggcgcgagtagaggcctccaagcacagcaaagaggtagcagaagcgcatgcttgtcatgctgataacctgcgtgccaagcgtgacgaagtagctaacttcctgggggtataaatgcgcataatcacatgggccaaagaacagtacgctgtgtttctgcttctgcgcgcacagcgtttgcagaagcgagcagacgactggcgctgggcagctaactctcacgcatacagggcaagccttctgggtcccgagattagtgcgcagcgttatcacttgaatcgccagtgcgccaagtcccggcgccgtgcatatgccctgggcgcagaggccacggccactgagaccaaagcctacgccttcattcaaaaacacaaactgaaaggatttgactaatggataaagtattagaagcgtacgagaaccttgccattacggtcggctcagcggtatacgatgcagcggcgtatggggtgcttaatattagtctggacgacatctacaacgcactagatgagctggcggccctgtacggaatggacctggacctggccgctacagccttccgggagcacaacgatctggcggcacatgccgataagttacgaggagacgaccttgtacttatccgcgtagtgggcacgctcagcgttggcctggcggagattggctcctgtatctacgacgtagaccagagcctgcgtactccggaagtaatcggggacatgctcggcaccgtgctggtgctgtctgaactggaggcttaagtatgttgtacgtatctcgcgcaatttacgtagctttgattctcccgctgattccattggcgggactgtgctaccttggcgataagctgagcaaggcaaagtgggcagaacgttgggttaactgggccgacaagaaggcccgcgatattacggggcgctgatgattatcaacggggttgacttgtcccagcttagcgagcagttagctccgcagaactctgggaagattctgctgtacgatgcggatttttgcgtgtacaaagccgccgctacagtaaaacgtttggataccgcaatacgccgcttctatcagctggtgcttgaggatatgttcctggtcggctgctcagaggcagtggcgtacctgacgcctgcgggatgtgctaagtgcttgcgctggcacctgcctacggctaagccctatcaggggcagcgcgctaatcgacaggagctaccgctcaaggcaccgttgaagcggcacctgattgagaacccagaccagtattctgagcagggtattcaggtagtcagcagtgactacttcgaggccgacgacctctttgtaatggattcgtacagcttcggagaccggggaatcctgatgtcccaggacaaggattcttggctcagccctatggctcggttcgatataccgacaggtacagtgtggcctgcactggaggacccattcggatgggttaagtgggatgacacccaggctatgcctgtacgagcacacgggttgaagttcttctggtggcagatgctagcaggggacgacgcagataacgtcaaaggcatcacgttgcttgatgggaagccctgtggcaagcgaacggcctttgatgctatctaccctattacctcagagcaggacgccgcagaattcgtcgtagcggcttacgctcgaaacaaccaagacgtactcgcagaggcagaatgcctgttcctgcggcgctccccgtcagattctgcctatcagtatctgatgtcactgttgactactcccagtctgcgtgactgggtgcattcgctgcacgagtaccataaacagcatatacagtggatacaggagcacccagacaatggcgaagatgtctgcgaaggaaatgagcctgcgggcgattgagttatactacgaggggaaacacgatgaacttgaaactattctggatgcgctgcgtgaacgagcacccaaaacacatcgaagaacggttgagcatttggattctctcattcacgacaatgctatgctggatgtagttggggggattgaggtatggtaatgagtacaccttgtatagaccatgggagaaaggggcggccaaagactgggttcctatccgcgtgggtgcttattgacggtaaacgccaacctacaaccgcacacaggaaggcgtactatgaacacacaggagagtggcccgaagtagtacagcacacctgtggaaattctcgctgcattaaccctgagcacctgcatggagggacccacaaaagcaaatcagcaaagggttccagcagcggccgctcacgtttgaacgaaggtacggtgcgctatctgcggcaaatgcacattcctggggaccgggaatggggtagcaacgctatagctagacgcctgggtatggctcaaagtacggtatatcgtatgttaagagggatttcatggcgctgcgtaaaataactcgagcacagattcgctctgtggctattaagcttgccaaagaccagggaggtatatgcctcctctgcggcaaacctttggacttcacaatcaagggggtaactggtgattctgttgtcgttgaccactgtcatattactgggcgtattcggggtgctcttcatcgctcgtgcaatggaggggaaggcaaagtggcatctgccgctgggcgctggattgttggtagcatgcaatcttctggggctattgctgaatctctacgtagggtcgccgattacttagaccgagaacctacggatatgctatactatacgcacaagacgccggaagaactagcacaagcacagaagctcaaggcccgcaaggccagggcacgacgcaaagcacgggagactgttaaatgattgaatccactaaattctatgcaggtgatttggttgtgcgcaaagcgagtcacgtagggggtatctggaaggacatctgtgaacagctacaggtagacctagactcccccagattagtgacgtgcgcagaagacggacttataaccttagccgagtgtgggacctcttggcgagcggagttcttccagctcttccattcgaagagcgaggctgtttctgactcagtgaactctcctcggcactaccagttcttcccggacctggaggcaatagaggtaattgcacgcagcatgacgcaagagcagttctacggctattgtctcggtaacagattaaaatacagactctgcgccggtaacaaggatacactggagcaggacattgctaagtccgataagtacccagaactgtatgagcaacaccgaggtaagtgcattgacgcttagtgcatggtgtcatgagatgtggcagagggtagtagagcggcgcgacaaaaagcacggggaggggctattaaatgaagacagtaatctttgatttggacggtacactagctgatggcgcgcaccgcttgcacttgctgcctactgtggatttgtatctgactgacagttggaatgagttcaaccgggcctcgaagtatgatagccctatccacagcactattgaagtgtgcaacatcatggtgcgagcagggttgcgagttattatcttgacggggcgctctgatatagtacgagcggaaacagaggcctggctggagcggaacttcgttatgtactccgagctggttatgaggccgcacagtgacaaccgaaaggatgtcattatcaaagaggagttcctgcgcaaccaagtggggttagaaaacattgtggcggcttgggatgacagccccgcggtgattgagcatttccgcggactgggtattaccacttacgctgtatgcgactatggtgcagcagcacatcgaacagacttaaaatcccacggggtggaggaattagcatgagtgcagtaggtacaggcatgaagtatgacgcagacaaacctcgaatggacttgctactggacgggtgcccgaatgcgttgctgcgtatcagtgatgtgctgaccttcggggcccagaagtatgcggcacacagttggcacacggtagccgaaggtaagtcccgatacaaggccgcgctactgcggcacctcacggcacatgctctgggggaaacactggactcggagagcgggttgccgcacctggcgcatgccgcttgttgtgcattatttattctagaactggagcagatggatagtgcggccgagtgagtggtgccacgggatgtggcagaaagcagtagagcggggcgacgaaagctccgctaaagactacctggagatgtataatctctgggtcagccgcaatcagtagttagaagtaccggacataaccaaggagactaagcgcctatgattagcgccctgaatacggttgtagtaccagaggaagcactggtgaaacgccagctggagcttgaagagacctataagattcgcggaatcgagcgggcacgtaagctgattacggacgcattgcagaatggtgggattatgaacctgccgatgacgcagcgtatgctcacctctgcatatgaggtggctgctgcagctatcgatgagatgcgaaatgtcaaagccccaggcattggtgggaagtaccgtcggttcctgcgcttaatccccttggatgtcctgaccaccctgagcctgtgcacaatgtttgaggcgttcagcgtcgcccctggcgagtccgccagtcgccgtcagactgcacaggcggtaatgtccgcactgggcagaaacgtacagtcagagctactggctctgcagttacgcaacgtagccccagcgtacatggaccgagtatatgagtatctcacagagcgccgtacgaagtcccctacgcacatcctgcgtacgctccgtgccagtgccgagaacgtacactatgggcacgagccttggaccaatgcccagaacatctccgtagggcgtctgctgtgtgccgcagtgtttgagacgggactgttccagtggaagaactgtagcgggaatctgagcatgctctatccggctgacgacgttatggaggccttccagaaactggtagagtccgctgataccgtaaccatgaagccacctatgctggtaccgccggtgcagcacactactctgtgggatggtggatatctcacccctatcgacaatcgcggcacctatcataattctcatatcgaccgcgcacgtctccgtgaagtagcggaagcatttaaatccgcggatggcatcaaaaaggcgcttaataaggcacaggaaaccccgtaccgtattaataagcgcatactggaactggtgcaagaagcacgggccctgggtgttgggataggtatgcctcgctcagtaccggagcctaaaccggagtggtatctggacggggttcctaaagagaactacacagaggaagagcttgaccgcttcggtgagtggaagacgcgtatgtccctgtggtacagtgctgaccgtaagcgcgtatcgcaactacgcagccttctgactacgttggagatggcagaggaattcaaagatgagaaagccctgtacttcccgacttgtgtggactggcgctaccgcctgtacttcaagtcctcgctgcacccccaaggttctgatttgcagaaagccctacttgaattcggacgtggtaagccgctgggggagcgtggcctattttggctcaaagtgcacgtcgctacatgctttggttatgacaaaaccctatccgaagaccgtgcagcttgggctgatgcgaactttgcagagattgagcaactcacaatctctccgtttgattgccctgcttttgccaaggcggactccccctggtgtttcttggccgccgctatcgacctggttaatgctattcgttctggatgcccagaagagtatattagccgaatcccagtagctatggacgctacgaactcaggtgggcagcacctctcagcgctcctgagagaccctgtgggcggtcgtctgacgaacctgtactgggagggtaacgacaagaaagcggacctgtatatggatgtgaagcgccgtacggacgagaaggtgatactggacctggacaaggaggatttcgttatccagagcacttactggagagagaacgaaatcacccgcagcatgaccaagcgccccagtatgacctacttctacagcgccacggtgcgcagctgcagtgactacatctttgaaggcgcttgcgctgaggggtatgaaggtaccgacactaacagtctatggaatctgtcgtgctacctagccccgcgtatgcgcgccgctatagaggaggcaaaccctgctgctgcggcagttatgtcgtacttgcagaacctcgctaggcgtgtaccggcaagccagcacctgcagtggtatacgccgctgggcgggctcgtaatgaaccgctacacacagcgtgaagaagtgcgggtacgaattgactgtatgaacctcacaatcatgcgcgtgcataatcgggatttcaagacctgtaacaagcgcaaggcagcctcggggattgccccgaactttgtgcacagcctggatagtacgcacttgatgatggttctatgtgccgccgagggtctggacattgtgccgattcacgactccctggctacacacgcagccgatgttgatactatgcaccggcacatccgcgagcagtttgtgcgtctctacgaagagcatgaccttcttggggatatcacccgcgcggcggcagcagctggtgcggacttgacggacctggatatgccagaggttggtactctggacatccggcaggtactggaatcacctttcttcttctgctgagggtatggtatgcgagtactagtaactggtgggcgagattacacagactacttagcactaaagaccgcaatggatatgctgccaaacaaaccatctgtagtgatacatggaaatgccagaggggcggacgcactggcagacaggtgggccctggaatccggtatttttgttctgcgtatgcctgccctgtgggatgtgcagggtaaatctgcaggtatgcgcaggaacgccgccatgatatccttggcctttccagaatactgcgtcgcctttcctggtggaaggggtaccgctggtatggttgagttatgtagaaaggccggtataccagtttgggtaccctactaaaatttaatgttaccggagtaggaatgaagttaaaacacactggtaaaacttccgattacactctcaaggttctgtataagtctgacgatattacagacgcagtgaagcaactgcacgaactgggccacggcattagtcggggcctggctcctgagcagcactactggagggtgttgggaagtatactgggtaaacagtatatactaggagtctatgactcccaaggcgacttagtcggtgccgtcagctactacccagaggctgtagaggactgtcattacgtagagcctgtgctatatacagacttcttcgtattgaaaccggacaacggcgcggcagtgtctgtgattatgcagggcctgcacgcaatagccaagtgcatgcgcgctgggcgtatcgccattagccggagcacgtctagtaacacgtacaaaacaacttatcatttagtgaggtcagaatgagtggtggtttaggtaaactgttaggcaaggccacggatatgctcggccttactgacaacgcaggattagaggcgcagcagcgcttggcagagcaacaggccagcgcagctaaacaacaggctgccttagaggctaatagcgccgcagataacattgctgagattgaccccgcaggggctgcctctgcatctgcagatgcaattacgtctgagcagaagaaacggcgacaagcagggcagagcaatcctctgggcctgtaagggggtagcttggaacaaaaagcaacattagcagaactctttaagaaggaccaggacgcgggcgtcttggatgcctctgagaagttcgcgcagtggacgctcagcacgatctttacccgggacgattccctggacggtagacgcaggccgctggagcgagactatcagagcaccggcgcgcagctggtcaacactgcagccactaagattgtaggggccctgttcccacagggcaccagcttcttccggttctccaagagttcggacctggacgagttcattagttcgctgggcagcgcagctacagcagaatctaagctggccgaggtcgagaacacggcgtcacagaaagtatttgagaaagacggttatgctgcgaagttgcaagctgtgaagctgctgctggttacaggtaacgcgttggagtatattgatgagcggacaggtaaatccatcgtctactcagtccgtaactttaccgttcgaagggatggcagcgggaacgtcctgcgactcattatcagagagcgcgcaagcgtccaggacctgccagaagatttccgcggcaccttctaccgtgacaaagacccatacggcgacgttgatatctacactgccgcttgtcgcaaggttaagcggacagaggaaggcgtagaagtagtaagctacgaggtgtaccaagaagcagacgggcaccgtatcggagacagcagcacctatccagagctggagcttccttacaacgtgctggtgtggaaccttgttagcggcgaacactatgggcgcggcttggtagaggactacgccggggacttcgcccgattatcagtactgtcggaagcgttgactaactacgaggttgagtctgcgaggttaatcccgctgattgacgcaagctctgggttagacgtggacgagttctcaacgtcggagacgggtgaggctgtgcaggtgggtggtggcggttccaacgggaacagcaaatcccccgtcactgcttacgagggcggctctgcccagaagattcagtggattgccagcaacatccagatgctcgaacagaaactgtcacgtgcgttcatgtacaccggtaactcccggcagggcgagcgcgtcacggcctacgagattcgccagaatgccaaggaggcggaagccgctatgggcggcgggttcagtattctgagcgacacatggctgcgtaagctggcgtacctgtacaccgcactggtgtatcctcgctttaagctgtacctcagcgaaggtgtagtgagcatcaacgttacggtgggcacctctgcactcgctaaagccgcggcagcggacaagctgttagaggcggcgcaatccatgcagctggctatcccggtgcttgagcagattactccgcgcttcaacaaagatgcgtgcgtagattggtacttcgacgcctacggtatcgttagcgagccgttcatgtacaccgaagagcagctgcagcagaagcaacaggttcaggatgcgtctgccgatacgtccgcaggtctagcacaggaccaactccagggcttgacagcagcagacccgacagtagcaggtaagcagctgggcttattaccaagttaacaacagaggcatagatggataacgtagaaaacggtcagaacgtagaaactacacaggtagagaaccaaggcggccctaagattccgggcctaggtgctccccttagcgccccgaacaatcaaggcgtgcaggatgcacagacccctacccagcagcaacagggcaaagattcccctgaccctgctaagattcctctggatatcgaagccctaaaagcggccctggataagggtggcgatagcgctaaagagcagccccaggagctggctaagacaggcaacccgacgattgacgccggtgtagctatgttgcagaaagtctctgggttaactgactctgatatggtgcgggcacttggtaaggccctggagtatcaggaccctaacctaatcgatacggccttcattaaggaacgtttcggagagcacgctgcttatgcagagttgctggctaaagcgtacctggaagaccaggttggtcaagccaccaaggcagtacaggaagcttacgatatcgtgggcggtaaggagaactgggaggtagcagcgcagctgtttaattccaaggcccctgaacctcttcgtaacgcggctcgtgcactcgctaactcgggtgagctcaagcaggccgctgagttggtggcaagcttctgccgggatatgggtcttatcaagacacagaacccaatggtacgcggtgtagccagcaacaatgcactatctgctgcggaattccgcgcagaatataccaaactccgtcaggaagcgggcaaccgtagcttggcgtctccacagttcagtcaacgttataacgatttgctcgcacgccgtgaagctggtaagcgcgtaggtctttaattttatttataaaggaaactaaagcatggccaacactatttataatggcaacctgacccgggcccactggggcggcgcggcgtctgacgtagatattcacctggaagtgtaccagaacgaagtggatacccgcttccagtaccaggctctgttcctgggcctctccagccagcgctctatcagcggttccaacacctaccgtattgaccgcctgaacacctcctcggtgaagggtcgtcgctctggtgaggcgctggatagcaccccggtccgtaacgataagatgattatcgtggtggatacggtgctgtatatccgtaacccgattgactaccaggacgactggaccggtccggacttcctgaccgagatgggccagaacaacggctccgagttcgcagagacattcgaccaggcgcacctgattcagctaatcaagggccgttcctgggttgctccggcgcacctgaaaccggcgttcaacgacggtattgaggtgggcgctgctatcctggttcctggcaccactaccgccacacagctgacccaggctgagatggaggctaacgccatgaacatcaacctggcccacaaggctggtattgatgaactcatcaagcgcaagaccccgctgtcggacatgattaccctggtggatgtcgatacctattcgcgtctgctggagcatccgaagctcctgaacctggaatttggcgcatccaacaacgacggttacaaagaccgccgtgtagttaagatgaacggcgtgcctgtggttgagtgcaccgagttcccaaccgaggccggtacgcacccgctgggtagcgcctacaccgtcacctctgacgatgcgctgtgccgcatggtgactttcagcaagtccaagaccctggtgactgttgaggctaagccgttcacctcccgtatctgggacgatgagcgtgagttcagcaacgtgctggactgctacgcgatgtacaacatcggcctgcgtcgtccggacaccgctgcagtgaccaagttcaccttcaccaccaagtcctaattggaggttcaatggcagtaatcgctacgttcggtctggagactctccaggccaatgcagctcagcgggaggcggttaaggccgccaccgatgtagctaagaacatccaggtggcttcggttgaatctggccgcaaggctaccaagaaaacccgtaaggcggctgacgtagccgctgatactgcggaagagtaatacgcgcccctggtgccttcgggtgccaggggctttttttttgtccctgtcttaaaggtccaaggggtctttaatagaggaacaaatatgagagaattagacgctgttaacctgacgctggaagcccttggggagtctcgcgttatggacatcaacactagtaaccctagcgctggattagctcgctctgcactcgcacgtaaccgtcgtgggttactcagcacgggattctggtttaacgtggtagagcgtgaagttacgcccaccaccgacggcctgattaaggtgccatggaaccagctggctgtatatgacgcctgctcagaatccaagtacggggtacgtgacgggaatctatacgacctggtagagcagaaccaatacttcgatgcacctgtgcgtattcgtgtggtcctggatttggcctttgaggacctgccggagcacgccgctatgtgggtggctaactacaccactgcgcaggtatacttaaacgacctgggtggcgacagcaactacgctaattacgcacaggaagctgagcggtacaagagcatggtgctgcgcgagcatctgcgcaatcagaagttcagcaccagcaagacccgctttgcacgcagaatccgccgtgctcgttttatggtttaaggagagtatatggcccagtccctagagggtaccattcagagcctgctgcagggcgtctcccagcaggttccaagagagcgccagcccgggcaactgggggcgcagctgaatatgctcagcgacccggtttcaggtatccgccgtaggccgccgggtgagattgtctgggaaagcacaatcgatagccctgggcttgattccctgttcactgaatacgtagagcgtgggactgacggtaggcacctgctgattaacaccagcaacggtaactggtggttgctggctaagaatggaaagaccatccttaattccggcaatgacccgtactttgttaccaccgtaggccagacctctttgcagaccgcaagcattgccgggctgacttatatcctgaatacggagatggccccgaacacaaccgtggacaatactgggcgcatcgaccccagcaccaccgggttcttctacgttaaatccgcagcattccagaaacgctggaacgtcaccgttacctctgcgggggtggactacactggggactacaccgcaccggctgctggcagcacgagcggtaacgctgaggaggtatcaggtgcctacgttgcccagcagctgcgggactctcttgtagcgaacgggctgccctccgggaacgtgagcgtacgtggtgcgtacctgttcttctacgggttgagcaactgcgtggtatcctctgacgcgggtgatacttatgccgtggtatccaaccagtcacgtgtagaccaggagcaggaccttcctgcacagctcccggcgcaagctgacggggcaatgtgccgtgtaggtacagcctcgtctgagacggcgtggtatcagttcagctacagcacccgcacctggtccgaggtgggggcgtacgatagcatcaccaagattacgaacatgcccagagagctcgccgcggatgacaacatcattgcgcgggattgggaggggcgcttagctggtaacgacgataacaacagtaatccaggattcgtcgagaatggctacatcactggtattgcagctttccagggccgcctggtcctgcttagtggtagctctgtggatatgtccgcctcgggcctgtatcagcgattctaccgctctactgtgacgtcactgctggatacggaccgtatcagcattagctctgcgtctgcccaggattctgtgtaccgcaccgctgtgcagttcaaccgggacttggtcctatttgctaacagcatgcaggcggttgtgccgggttcggcagtacttacgccaactaacgcaagcattagtattaccagcacctacgattgtgacagccgtgtgactccggtaatggcggggcagacagtaatctacccgaacaagcgcaacgacagctacgcgggtatattggagctaatcccatcaccttacaccgcggcacagtacactacgcaggatgccacggtgcacctacctcggtatatccccggtagggtgttgcagatgcaaaactccagcgtcaccaatatggccttctcgcgcatgtctggagagcgtaacagcctgctggtctacgagttcatgtggggcggaagtgacggcgctaagatgcaggcggcgtggcataagtggtcgttcccgtacccaatcctgagcgtacaggcgctggaggatgaggtgttcttgtacatgcaagggcccagtcccagcaacaagcttttgattgtgtctatggacccgcgcgaaggttatcagctgggctcagagtaccgcgaagcctactcggatttgcagaagcaagttcaagtgcaggacggggtgttcactgtcccgtcggtattgcgcccggttgggtgggcggacaactacaaggaagagcttatcctaacgtacctacccagcaaccctatggggcctactgaggttggcatcaaggagattgctggggagaacaccctacgggttgtgcgcggtgtacctgatggcacttatgtaatcgggagacgttaccgtagtacgttcacgctaactacgcctattctacgggaccagaatgacaagctcgtgggaagtgggcatgtgcgcctgctgcgcctggacgtggcagtacgtaactccgggcacttcgacgtacaggtactagacaccccgcgggacgtcaattggggtggggaactgactggtatcttgatgaactcaaaggagctgacgcttgggcaggccctgcgtatggacctggctacgattaccgtaccatgccgcactaacgcagacacaaccgaggtgtcactatttactgacggttctatggaactgaacgtgttggatatatcgtacatcctgcgctacaaccaacgcagacggaggatttaatatgtggtggatggttgcggccatggccgctaagaccgttctggggcagggtgctcagattgaagtgtccaaggccaggaacaaggctgtgattcaacagacagccaaacagctaaacgacatcgcgctacagcgcgcccagtccagggaccggactgaggtgtctctgtttaacattcagcagcagaagctgcaggcacagagccaagtaggactgcaggcagcagcttccggcactatgggagcctctgttaaagacgcagtagccacggtgaacactgtagccgggcggcaagaggccagcgtgcgtgaccagcaggcaactcaggaagagggcttccgtctaatgacagataaggccgtggatagcggcctggctaacatggacatggaggacccctacgataacatgtttaactcgttgttgagtgtcggggcatctgccgttgggcagtacgctggtaacgctgcgtcgtctactgactctggtagctcttcgcctggtagcggagcgtcagctacgcagagcatggcatcctcctatgacttatgggggagtaagggcaatagcccagttcacacctggtaaattaggaggaatactaaatgcctgtgattcaacccagtagacaggggttaaatatcggtggcgtgcaactgcaatccaacgatgttagcttgccgtcaacggtaagtgaagtatctgttgatacctccaaagcaaaacgcctagccgccctgtctggattcgtgcaggacttcggcgtaggtttcgacgcggcagtaaaagaaaacgccgcagccgccaccgtgcgcggcgctatggatgctcagggcgcagtagatgcaatggcctccaaggacgaggctgtacagaagcaaaacatcttcgtgcgcgaagcctatcaggacggctacgtatccgccgcagcgtacgacactctagctaagtggcgcacagacagcatagcccgggctaagaaagctgccgaggcagggctgactgacgaggaattccagcagcaggagcaagagcacgtacagtcaatggcagacaagctcggggtgtatctcccggatatgtccaagcagtctgctacgagtatactgcagcagctccgcgctaccagcatggctaactatacagccttccagaaaggacgtgctgcgttcgccctggcccaggctgaccgtgccctagaccgtggactgagtgcgtccagcgatgagttctatcagcgtctgcaggcaggacagggtgccgccgcgcagatgtctatcaagaccggattagacagtatcctggctgccgagcacttggacaagaacaagaagctggacagagccaagcagtatctggttagcgtagcgcagcagacgcaggacccactggtaattaaccagctgcaggaaatggccaccaaggaactcggcgtcaactccgtggatgtcaacgcggcactgtatcaggagttcaagcgcgcaggtgctcagattgagacacaggcccgtttcgaaatctctgatgcaatacagtctcttgaggggcagacacctgagcagcaagaacagactatgcagcgtattcgtagtcgtgtcattgagctgtcggcatctgatgtacttagcgccgggaccagcatggagttctggaacaaagcccagaccattcgagagaaggcagcagacgcccaagcattgcgcacagcaattactgggaatatgccaagctctactctggcgggcatgttcaaaggggacttagataaggcacgtactcagctgctcaagagctttccggatacccccgaagggaacctgcagctgctggcatacggaagcaacagcaaggatgcgtgggccgtaaacgaggcgcacaagcgtatgtcttcggatatggcacgtacgctgactacgctggaccagctcggtgaagatggcgaggtttcccgcgagaacgtcaatagcatcaacttgtgggcacaggcttatagcaccagtacggacttagggaagatggcgctgctgtctgaggtcccatctgagtggcgtggagtggtgcagaaagctgttacgcaaaacccaaataatgccagtaacactatcttggacgatcttcgccgccaggctcgtaataaggcgagtgggcgctacagcaatatccaaagtaaccccacggacaagatggtagacccaagcggcacggctaactggttcagcttcttcggggatgcagacgcacagcgccaggaagcgcgagctgctatggaagatgagtaccgttatgtgtataaccacaatccggaatcccttgtagggaaggacgctgacgacatcaatacgatgctaaaaggcaatatccaatcccgtaagctggagctggacattgccggggcacctaggcatgtgtatctgcccgctggcacctctatgcaatctatcatgggtgattataagggcgaccaagagcagttcaaggcctccctgcagcagcatatacagaaccaggttcagtatatgtcagaccccagcaacatagagcgtgtagtagtgcaggccgccaccgctggcaacgcaggtcagaacatgaccgtaaccgtgttcgacaagaagggcaccttccagacgatgtctgtgaaccttcgagacgttcagacgactgcgcaggctgcgtatgactcagcactggctggagagatgaagattggaagcgagcaagtaggtgtacgtcctgccaccttctacgaccacgacaacgggcgtgccgtcagcgtacaagtaaatggccgtaactcggtagggctggaaccatcactgtttagtgacatcctagccactactatgaagttcgaagggttccgagaaggcaagggtaagggtagcgtaggcttcggcctgcacgttaactctggcatgcccgtcccccagaaagttaccattgacgacggtatcagtatcctcaaatcctcactggaggagcagtacataccgaacgtgcagaagcaactcaagggacagggtttgactgcctccgacgaggcgttaaaggttatggtggacctgaactatcacggtggtaacggtagctccggccccgtagcagaggcgatggcacaggtacgcaaggctgctaagtccccggtgggggcgtatcagtaccctgtatctgaggcccagggtagggcttggcaagcgctgcggaataccccggcgtacaagcaggcccaacctgggcgtaagaagtacctggaacaaaacctacgtgattggctcttcgaagcaacgcactaaccagaggcccttcggggcctccccttatcaaaattcttttaggagatattatggctcagtttctgaaccaagaaccgaatccacaggaaaaggattctgctaagggcgcaacacttaaatctgcgcctgagcgcgtagattggaacgatgccggggacaacggtctgaacgcactggggcgtgcctcattactggcacaggccaagaccccagctactacagccgcagagagctttgcctcgggtatgggcaacagcatcatcgccgcagctatacgcaaggcctctgccccggcatttgaccgagacccgaactttaatgccaagcagaccctgagtagcgatactcgggctaagctgtacgccccaaatcaggaagagattgagtacctgcatgactccgtgtcagtagaagattacaactaccgcatgcagcagatgcttgagcagcgtgaccgtgaccgcttaatggctgacaacacagtagctgggttcgcgggtatgttggtaggggattccccgttcatcctggccccgatgtctgctgctggtattgctggccgtgcgggcttagctgcacgtaccgctatacgcgctgctgatgtaggtactgcattctatgcacaggaccaactggggcagtctgctgcggtaactgcactgatagcgggcgtagctgggttagaccagctctgggatatgtctagggctgctaaagctgccgccaaggctcgtactgggcgtgagcctatgttcgacccagaagcgcctacaactcgtacagctagggatgctaatgttaccggagtaggagagggagaggaaattctcactaagacactggatgaaagcatccaagtatcgagaaacaataccgcctccgtgaacatgaaagcacagcacgtagttcagttcttgaggaagtctgagcacttgacagcaggacagaaggctattctggacacgctgggcgatgctgtaaatgacattgattttaaactagtagcaggctccgcaaaccgcagccgctacacttatgcacaacaagatttagctaagcggggagagatatccctgcgcgcgcctaagcaagctaacggcagcacctggactacagtcggtgatgcgctgcgcgctatggatgcagatacaagcaaggtggccgtgcacgaactgattcatgccgctactgcgcgcgctattgacagtaatcccgagattgctaaacgcctggaggaagtgcgcgctgttattgcggctgattccaccctgacaccgcgtatgcgatattacgcaagtaatgtgcacgagatgctggcaggcttaggcgacagccctgagtgggttgagcacctggcacgtacgcagtctcccaccggcaatagcatgctccgccaactgggtgagtacatcatgaacgctctgggcatcaaggccaaaggctctgccttggaggatgtactggatgcgtatgaggatgcagttaagtggacagctaaggattatgcagaccaagcccagagcttccgtagtgaggctttccaggacctggcgggcagcactaccctcaacgaggctaagcgtgcacaagctatgctggacggcgctaagaagaagctctccactatgtttgcactgtacgataatatcgcccaaggcaacgaagacttggctaaactgctagtgtcggatgcgtctgcagtaggcggccgtcgcccgtcagtggtagactacaagcgtaacctcactttggagatggatgcccgcgccagcgtagttgaagatgctatcctaggcgcgttgaaggataagggtgtaggggtgctctcacgcttcttccatcggagtaatttccgcgctgagcgggctgcgctggaggaccgcctgagcaagtacctggatgctgcctacagtgctgacgtaaacggccgcgctgtgccggtgccggatgcagagattgctccgctggttgatgcttaccgccgctctggctgggctagcaagtggcacgagcatatgctcaatgccggtctagtggatgatggtgcgttggttaaatccgactactacttcccgcgccagtacagctacgacaagatgcgccaaggtatcgcgcagggtaacactctggacgactaccgagccctgttccgggccgccctgcgggacgtgtaccctagcatggagtcagaggtagtgcagcgtgttgccaaggagatggttgacggtatctacaacggccgtgcgggacagtctggccctatgtggaagcagctgattaacggcatgggtaacgatgaggtcgtcatggctatgcgcagcgctggtgtagaagagtctgcaatccagagcttcctggctggtaacgtacgagaatcaggcagcacatcccctgcgcggaacctgcgtcagcgtactcggttcaacatggacaaagagtacctgattaacggaaagagcatgcgtatgcaggacctgatggatactgacgtagccaaggttatgcacgggtacactaaccgtatgtctgggcgtgtcggtatggcctatgcaggcgtacaggacctggggcagctcgctaagatgattgacgagtccaagcacgtactggcagattctgctaagtgggagaagaccgtcaatgacaccatcgactttatcctgggtggggcacctgctgacgctgggcagcttccggacttgctgcgcgcagccgggaacatggctaacgccactatgctcaagaactccggcctgtatcagctgaccgacactgcgttggctatgaaggagtttggtatggcccgtgtgctgcgcagtatgcgagaccaaccttggttcaaggaaggtgccgtagctatcaagactccggatatggctgcccgcctagacactgtgctgaggggaaatatccagaaggagatgcgcttccgctggctgaatacgtacgctgacgataacctggacctgacccgtcaggcctcctggttcaacgtcactcagaacgttgggcaggctgcacgccacgtcaacggtatgagcatggtgcatcggctgcaggttaacctgaactccggtattgtggcggacgagcttacgcagatgttcaagggtgatgctgaggcgtttaagcgtctggagcgtttcgggcttacccgagatgttgcggaccgcgctatcgctgccaataaggctaacccgggcgccatgttccagccggacctgcagatgcaagttgaggttgtaggggcgcgtatgatggactacctggtacagcagattcgtactggagagacctcacactttgcacagttcaaccctatcggcaaagtcatcgtagggtaccagagcttcgcactggctgccactaacaagattctgcgtagagagctgaacgatgctgggtggattggtgtagcccacattatggcataccagttcccgttgatgctgctggctactatggctaagcatggcatggatgggaaggacgtagacacccagaaactcatcagtgagtccgtaacgggtatgagtgccatcggcgggg

SEQ ID NO: 51 - DNA, 43626 bp, Unknown
  source: /note="Description of Unknown: KP2M-P0211 Bacteriophage sequence"
gggcggacaactacaaggaagagcttatcctaacgtacttacccggcaaccctatggggcctactgaggtcggcatcaaggagattgccggggagaacaccctacgggttgtgcgcggcgtacctgatggcacttatgtaatcgggagacgttaccgtagtactttcacgctaactacgcctattctacgggaccagaatgacaagctcgttggaagtgggcatgtgcgcctgctgcgtctggatgtagcggtgcgtaactctgggcacttcgatgtacaggtactagacaccccgcgggacgtcaattggggcggggaactgactggtatcctgatgaactcaaaggagctgacgcttgggcaggctctgcgtatggacccggctacgattaccgtgccatgtcgtaccaacgcagacacaaccgaggtgtcactatttactgacggttctatggaactgaacgtgttggatatatcgtacatcctgcgctacaaccaacgcagacggaggatttaatatgtggtggatggttgcggccatggccgctaagaccgttctggggcagggtgctcagattgaagtgtccaaggccaggaacaaggctgtgattcaacagacagccaaacagctaaacgacatcgcgctacagcgcgcccagtccagggaccggactgaggtgtctctgtttaacattcagcagcagaagctgcaggcacagagccaagtaggactacaggctgcagcctctgggactatgggggcctcggttaaagacgctgtagccacagtgaacactgtagccgggcggcaagaggccagtgtgcgcgaccagcaggcaactcaggaagagggcttccgtctaatgacagataaggctgtggatagcggcctggctaacatggatatggaggacccgtacgataatatgtttaactcgctgttgagtgtcggggcatccgctgttgggcagtacgccggtaacgctgcgtcatcttctgactctggcagctcttcgcctggtagcggagcgtcagctacgcagagcatggcatcctcctatgacttatgggggagtaagggcaatagcccagttcacacctggtaaattaggaggaatactaaatgcctgtgattcaacccggtagacaggggttaaatatcggaggagtgcaactgcagtccaacgatgttagcttaccgtcaacggtaagtgaagtatctgttgatacctccaaagcaaaacgcctagccgccctgtcagggttcgtgcaggacttcggcgtaggtttcgacgaggcagtaaaagaaaacgccgcagccgccaccgtgcgcggcgctatggatgctcagggcgcagtagatgcaatggcctccaaggacgaggctgtacagaagcaaaacatcttcgtgcgcgaagcctaccaggacggctacgtatccgccgcagcgtacgacactctagccaagtggcgcacagacagcatcgcccgggctaagaaagctgccgaggcagggctgactgacgaggaattccagcagcaggagcaagagcacgtacagtcaatgtcagacaagctcgggatgtatctcccggatatgtccaagcagtctgctacgagtatactgcagcagctccgcgctaccagtatggctaactatacagccttccagaaaggacgtgctgcgttcgccctggcccaggctgaccgtgccctcgaccgtgggctgagtgcgtccagtgatgagttctatcagcgcctgcaggcaggacagggtgccgctgcgcagatgtctatcaagaccggattagacagtatcctggctgctgagcacttggacaagaacaagaagctggaccgagccaagcagtatctggttagcgtagcgcagcagacgcaggacccgctggcaatcaaccagctgcaggaaatggccaccaaggaactcggcgtcaactccgtggatgtaaacgcggcgctgtatcaggagttcaagcgcgccggtgctcagattgagacccaagctcgtttcgaaatctccgatgcaatccagtctctcgaaggtcagaccccagagcagcaggaacagactatgcagcgtattcgtagtcgtgtcattgagctgtcggcatctgatgtacttagcgccgggaccagcatggagttctggaacaaggctcagaccattcgagagaaggcagcagacgcccaagcattgcgcacagcaattactgggaatatgccaagctccactctggcagggatgttcaagggtgacttagataaggcacgtacgcagttactcaagaatttcccagacactccagaagggaacttgcagctgctggcatacggaagcaacagcaaggatgcgtgggccgtcaacgaagcgcacaagcgtatgtcttcggatatggcacgtacgctgactacgctggaccagctcggtgaggacggtgaggtttcccgggagaacgtcaacagcatcaacttgtgggcacaagcttatagcaccagtacggacttagggaagatggcgctactgtctgaggttccatctgagtggcgtggagtggtgcagaaagctgttacacaaaacccaaataatgccagcaacactatcttggacgaccttcgccgccaggctaggaataaggcgagtgggcgctacagcaatattcaaagtaaccccacggacaagatggtggacccaagcggcacggctaactggttcagcttcttcggggatgcagacgcccagcgccaggaagcgcgagctgctatggaagacgagtaccgttatgtgtataaccacaatccggaatcccttgtagggaaggacgctgacgacatcaatacgatgctaaaaggcaatatccaatcccgtaagctggagctggacattgctggggcacctaggcatgtgtatctgcccgctggcacctctgtgcaatctatcatgggggattataagggtgaccaagagcaattcaaggcctccctgcagcagcatatacagaaccaggttcagtatatgtcagaccccagcaacatagagcgtgtagtagtgcaggccgccaccgcgggcaacgcaggtcagaacatgaccgtaaccgtgttcgacaagaagggcgcattccagactatgtctgtgaaccttcgagacgttcaggctactgcacaggctgcgtatgactcggcactagctggcgagatgaagattggcagcgaacaagtaggcgtacgtcccgctaccttctatgaccacgacaacggacgtgctgtcagcgtgcaagtcaacggtcgtaactcggtggggctggaaccatcactgtttagtgacattctcgccaccactatgaagttcgaagggttccgagaaggtaaaggcaagggtagtgtaggcttcggtctgcatgttaactcgggcatgcccgtcccacagaaagtgaccattgatgacggcatcagtatcctcaagtcctccatggagaagcagtacataccgaacgtgcagaagcaactcaaggggcagggtttgaatgcctccgacgaggcgttaaaggtaatggtggacctgaactatcacggtggtaacggtagctccggccctgtagcagaggcgatggcacaggtacgcaaggctgctaagtccccggtgggggcgtatcagtaccctgtatctgaggcccagggtagggcttggcaagcgctgcggaataccccggcgtacaagcaggcccaacctgagcgtaagaagtacctggaacaaaacctacgcgattggctctttgaagcaacgcactaactagaggcccttcggggcctccccttatcaaaattcttttaggagatattatggctcagtttctgaaccaagaaccgaatccacaggaaaaggattctgctaagggcgcaacacttaaacctgcgcctgagcgcgtagattggaacgatgccggggacaacggtctgaacgcactggagcgtgcctcattactggcacaggccaagacaccagctactacagccgcagagagctttgcatcgggtatgggtaacagcatcattgccgccgctatacgtaaggcctctgctccggcatttgaccgagacccgaactttaatgctaagcagaccctgagtagcgatactcgggctaaattgtatgctccgaatcaggaagagattgagtacctgcacgactctgtgtcggtagaagattacaactaccgcatgcagcagatgcttgagcagcgtgaccgtgaccgcttaatggcagacaacacagtggctgggttcgcaggtatgctggtaggtgactccccgtttatcctagccccgatgtctgctgctggtattgctggccgtgcgggcttagctgcacgtactgctatccgtgctgctgacgtagggtctgcattctatgcacaggaccaactgggccagtccgccgcggtaactgcactgatagcgggcgtagctgggttagaccagctctgggatatgtctagggctgctaaagctgccgctaaggcgcgtactgggcatgagcctatgttcgacccagaagcgcctacaacgcgtacagctagggatgctaatgttaccggagtaggagagggagaggaaatcctcactaagacactggatgaaagcatccaagtatctagaaacaataccgcctccgtgaacatgaaagcacagcacgtagttcagttcttgaagaagtctgagcacttgacagcaggacagaaggctattctggacacgttgggcgatgctgtaaatgacattgattttaaactggtagcaggctccgcaaaccgtagccgctacacttacgcacaacaagatttagctaagcgtggggagatatccctgcgcgcgcctaagcaagctaacggcagcacctggactacagtcggtgatgcgctgcgcgctatggatgcagatacaagcaaggtggccgtgcacgaactgattcatgccgctactgcgcgcgccattgacagtaatcccgagattgctaaacgcctggaggaagtgcgcgctgttattgcagctgactccactttgacaccgcgtatgcgatattacgctagtagtgtgcacgagatgctggcaggcttaggtgacagccctgagtgggttgagcacctggcacgtacgcagtctcccaccggtaagagcatgctccgccaactgggtgagtacatcatgaacgctctgggcatcaaggccaaaggctctgccttggaggatgtcctggatgcatacgaggacgccgttaagtggaccgctaaggattatgcagaccaagcccagagcttccgtagcgaagccttccaggacctggcggatagcaccaccctcaacgaggctaagcgcgcccaagctatgctagacggcgctaagaagaagctctccactatgtttgcactgtacgataatatcgcccaaggcaacgaagacttggctaaactgctagtgtcggatgcgtctgcagtaggcggccgtcgcccgtcagtggtagactacaagcgtaacctcactttggagatggatgctcgtgccagcgtagtggaagatgctatactgggcgcattgagggataagggtgtaggcgtactctcacgcttcttccatcgtagtaatttccgcgctgagcgggctgcgctggaagaccgcctgagcaagtacctggatgccgcttatagcgccgacgtaaacggtcgcgctgttccggtgccggatgcagagattgctccgttggttgatgcctaccgtcgctctggctgggctagcaagtggcacgagcatatgctcaatgccggtctagtggatgatggtgcgttggttaaatccgactactacttcccgcgccagtacagctatgacaagatgcgtcaaggtatcgcacagggtaacactctggacgactaccgagccctgttccgggccgccctgcgggacgtgtaccctagcatggagtcagaggtagtgcagcgtgttgccaaggagatggttgacggtatctacaacggccgtgcgggacagtctggccctatgtggaagcagctgattaacggcatgggtaacgatgaggtcgtcatggctatgcgcagcgctggtgtagaagagtctgcaatccagagcttcctggctggtaacgtacgagaatcaggcagcacatctcctgcgcggaacctgcgtcagcgtactcggttcaacatggacaaagagtacctgattaacggaaagagcatgcgcatgcaggacctgatggatactgatgtagccaaggttatgcacgggtacactaaccgtatgtctggacgtgtgggtatggcctatgcaggcgtacaggacctgggccagctagctaagatgattgatgagtctaagcatgcactggcggactccgctaagtgggagaagaccgtcaacgacaccatcgactttatcctgggcggagcacccgctgacgctggacagcttccggatttgctgcgtgcagccgggaacatggctaacgccaccatgctcaagaactccgggctgtatcagttgactgatactgctttggctatgaaggagttcggcatggctagggtgctgcgcagtatgcgagaccagccttggttcaaggaaggtgccgtagctatcaagaccccagatatggcttctcgtctagacaccgtgctgcgaggtaatatccagaaggagatgcgcttccgctggctgaatacgtacgctgacgataacctggacctgacccgtcaggcctcctggttcaacgtcactcagaacgttgggcaggctgcacgtcacgtcaacggcatgagtatggtgcaccggctgcaggttaacctgaactccggtatcgtggcagacgagcttacgcagatgttcaagggcgatgctgaggcgtttaagcgtctggagcgtttcgggcttacccgcgaaattgcagaccgtgctatcgctgccaacaaggctaacccgggcgccatgttccagccggacctgcagatacaagttgaggttgtagggacgcgtatgatggactacctggtacagcaggttcgtactggagagacctcacactttgcacagttcaaccctattggcaaagtcattgtagggtaccagagcttcgcactggctgccactaacaagattctgcgtagagagctgaacgatgctgggtggattggcgtagcccacattatggcgtaccagttcccgttaatgctgctggctactatggctaagcatggcatggacgggaaggacgtggacacccagaaactcatcggcgagtccgtaatgggtatgagtgccatcggcgggatatccttactgcaggatatcttcctgggagattctcctcgtcactcattagcatctatgggttacgtcacagggctgcttggagcggtgcaggacctggctaccggtaatatggatatcaagaccttcactaagcaggtcccgttaatccaggaattcgcacctacgcgagctataatcaataacttcggagacgattaatatggcattcagctggcaagagcaaatcaagccagctggtacccaggatatccagtgtgatattgagtatttggacaagtcctatattcatgtatatctcgacggcgttgaaaccactggatacacttggaccagctccactaatatcagactaaatacagccttggcagcaagcacgactgtgctgctaatccgtaagacagagcgagagtatctgtacatcgagttcgcaagcggctctccgttcatcgaggtaaacgtagattctcaaaatacccagttcttgcacctggctcaagagctggtagagggcagggctatccccggattctacggggatataagcatgaatgggtatcgcattactaacatagcggacccgacaggccctcaggatgccgcgaccaagaactatgtagatgttggtgatgctaggcttgacgcgcgcattgactcagaacactcagcctgggtatccgccgtgcagacagaggcggctatccggaaggcagtggacgacgcactgagcgcccgtacttccgctttggagaacacctttataagcggggtagagacagttagctacccgtggagcacggtgctgaccgaggatacggacgaagtgactcctggcctagcattcaccaaggctgtagtggagattaacggggttgggcagattcgcggttacagtttcgagattgtagataatacgatactctttgcagagacattacctgcaggaactattgtagccgcccgactgggggtcgacgtaactgcgggggacggattcgctacacaagcatccgtagattacttggccgactccttggggaatttggcgtatctggataaagccacggctgtatctgatgcaacaggtactggagacgtagtggctcaactaaatgcgctgctggcagcactacgcactagtggggtgctaggaacgtaacaggagaaagtatggcaggggcggctaaacgtagtcgcctctcagagctgcaccgcatgttcactgaggccttgattgaagaaatcaagcagtctaaggaagatgaggtgccgctccccgccgcagataagtcagttatcgctaagttcttgaaggacaatgacatcaccgcggatgcagattccgaggagatgcaggaccttcgcgacgagttcgatgacgaactagcggcgcgcagagaggcgcgtaagaaagagattttaaacaagattagtggttcagattctgaggacttactagaaggaattgtctaatggtatcggtgaagactgcgcgaagactgcgcatgctcaaccagaaacttactggttatagcgcgaatccgcgcagtattcccaaagaggagcgcgaggacatcgcgatgatgatggccgcggcgctgagtgacttccgggaatttgcgtacatcggtatgcggttcctgggctttacgctcacggacatgcaggccgacattgcagagtacatgcagaagggccctaggaagcgcatggtggctgcgcagcgtggtgaggctaagtctacactggcagcactctacgccgtctggaggcttatccaggaccaatcctgccgtatcctgattgtgtccggcgcggagaagcaggcgtccgatgtagctaacttaatcattcgtatgctggaaacctggccgctgctgtgctacttgaaggctgaccctactcgtggggaccgtacttcattcgaaggttacgatgttaactgcgacctgaaacctctggataagtccgccagcgtagcctgtgtaggtataaccgcatccttgcagggtaaacgtgcggacctgttgattccagacgatatcgagaccactaagaacggcttaacgcaaacccagcgtgagcagctgctgatgatttctaaagacttcgcagctatctgtacgcacggggatacgctgtacctgggtacaccgcagaccaaggacagtatctacaaaaccctgccgggacgtggcttcgaggtccgcgtgtggccggggcgcattccgtctgttgaaatggaagagcgatatggaagtacacttgctccttatatcctggagcttattgagcgcggctataaacgcaccggcttcggcgtcgacgggacgctaggcgagagcacggacaccggacgctatgacgaggatgcgctgattgagaaggagctggactttggtccggaaggcttccagctgcagtatatgctcgacaccacactgtccgaccagatgcgtacgcgcatcaagctttcggatatgctggtttactctggcagccaggattcctccccggagacgttctcctacatcgcggaccgccggtacctgtaccagcacgagcatgaggggattatgggtcagcagatgtacttcccggcattctatggggacatgcacctgccgtaccagcataaggtgctggtggtggacccggccggttgtggcggagatgaagtgtcctacgctgctggtggtgctgcgaactcgtacattcacctattctccgtaggcggcttccaaggaggtatcagcgaagagaacattgataaactgattgacctgtgcgtagagttagacatcccggatatggtggtggagagcaacatggggcacggtaccgtgtctatgcttatcctgaaccggttacgggagcggcgtctcgccggtattggtgtacgggacctgaacaactccacgcagaaagagcgtcgtatcatcgacacaatcagcccagttactcgccgccaccgcctggtagtgcatgagcgtgctattcacgatgatatcagcacttgtatggcgtacccccgggataggcgttggctgtactctgcgttcgcgcagctgtccggcatcacgtacgaccgcggtagcctggctaaagatgaccgggcagacgcaatagccatgatggtggctacgctgaacgggcatctggtggaagatgagaaagtggtggctgagcgtgagtccgagaagatggctcgggccttcattgagaacccgctggattgggcacagagcaaagtgtctaagggccttcggggtgtagctgctcggctgcagaaccgcggcagaggtaaacaacatagaggaagaagataatggcatcaatcatcgcagctaaagctgtggatgtacagtatgagattgtgggtaaggcccagaatctggagaagcaagtatctccagactacaacgtgggctttgtcggcaccgcggccctagacactctgaatacgttctttacgtatatggagggtcagggctataccgccaccgcggaaggcgctagcttcgttgctgacggcacgctacaggctcgtctattcagtatgctgtcgcagctgagcaagaccggctacgttgcgctgactggcactggtatgccattgggtgagggttcaggtaccgactttgatacctcattcaccgccctgcaatctgcatttgaggctgctacagtagcggcagaagctgaataataaaccaaaggagagtacacatggcaattgcaaaagcaaccccagcgcaacagcaggagctgctgcgccagctgaacattctcggtaaggacctatatgctatccttacgcagccgcagaacgtggcccagaccggtgctgccttcgataccaagattgctgcacttgaagccgcggtagccgcagtgaaggcggcaagctaatgcgtaaactggtcgctgggttactgctcgcggttactttgactggttgctcggcgacctctgcactcaccggcttagttggttctaagccggatgtatctgctcaggttggtgccgaaaacaccaagcaaaccgttggcctgaacaacaaggtggactccagcaccaccaacaaaaccgatgtatcagattctaacgtaggcactttggatacgtccagcaagaagcaggtgcaaactattagcacggggacaatccaggcagaacgcttacaggtagttaacaatgatagttacagtcttatcctcgccggattagctggggccagcattcctctggtcttcctagtggtcattctggtgattcgtaagctattcaggaagaaggggcagcaggatgattaaggtaggggacatggttgggccggacctcgctacccgggcaggcgcagcagttactggcgctacggtatcaggaggttggttggcagagttaatgagctggaactggagcactatcagcttcatcactgcgacggtgtgcgcggtgctaaccctggcgtggaatgcgtattacaagcggcgtacattcaagctcctagaggagcaggcacgtaaggggactattaaatatgagtttaaggactaaggttattgcggccctcacgggggccactatgctcggaggcgccattaccggcgtagtgcagcacaacgagggtctgagccttaccacctacaaggatagcgcaggtgtccccactatatgctatggcgagacaaagggcgttaaaatgggccagagagccacgctgagcgattgtcagaagcagctaatacaatcagcaggggaacacgcaaaggctcttgacgggcttcctatgcagctctctgacgtagccctggttgggtctgtagacttcatttataatgtaggcgtagctggcttcaacggtagcgccgtgaagcggcatctcaagagcctggattatgcagcagcagggaaggccgtactggactggcgctatattagcaaataccagcagaaatcccccggcaccggttgggtgtacaagggcagcaaccgctggaccttcgactgctcccagtatattaatgggcagcgcaataaagtgtgctggggcctatgggagcgcaggcagtggcagagcaaagccattgggaaccagtacaagaatgtaagcacagccctggctgaattgaaacgataagaggggacacatggcactagtagagaacgtacaaacacggtactacagccaagacgatttgtggtgcagagtagctgactacttagcgaaggatgccccggtacttaccggactccgtccggattcttctggtaactatgcagccgctattgagcggatttccgctaaaggtgtaaaggtgctgcgagtacctgtggggtcttattatgttggagactgccaccttactaaccctatgctgtttataggtgatggcctagagggcgttaacccgcttggggctgtattcgttaaaccgagcacagccagtaagatgttctactttgacggtacgagcacccgtggaatgggcggcgggttccttagaatgcgactgcagggggctgtcagcagtgattcgggacttatggtggaggtaacgtcctggagctattttggggcggaaaactctgcttttaataacttggcgggctctgcgctggtgttgcgtgactgtatggagagtcacatctccggaaacttattccgtaggatgggtgcctctaacggcagcgttatactcctcggggattacataggtattcctaataataacgtcaataacctgcacattcagaataacacattcgggttgtgctctggtgcgtggattaagagtacagcaaacagtaacccggacctggtgtggattacggataataagtttgagtgggatagtgtaccgtacggagctaacacaaccacgcagcacgtactagactttggacagctgtcacgctcttggattacccgtaacggttttgcgcacttccgcccagactccgaccataacctgtatgccgggtgtattcgtattaggtctggagctgttggtcctattgttatttctgataacaaggcgtatgggtgcgaaggagaattctggaccattgaaggtggttatgtagatgccttcgacaatgatgcgaacattgcagatgccagcagtgttctatcctggtcactgagtagtactagggcttgccgcatcaaccctcctcgcgtatacagtgggaacatgaacgtagtgcgcggggatagtccgttcggccctgggtttatcgggcaggcgtacatgcgcggggctgctgctgctagtcgtaccgttagggctggagccgctagtaccgtggcactagatgtccctgcgggccaggagatgcgtcggtaccagttgccactgcaccttctcggggctatagtgcgcgtatccttgcgagtctacaatcccggcgctactggtaacataaccttagcagtgggtagtggcggctcctctgttgctgcggtaccggctggtccagggtggttcgatgtagacttttacttgggtaacagcctaactggggacggagatttgcgcttcaccaacagcaccggaaacacactgagcctggatggtattacagtagagcgtgctcgttctgttccatttagctttgcgtggaccccaggtgctgtcgctgctggtacgctggtatctagtcctgtgcaaaccctgccgtacggcattactcaagcccctgtcggtttgagttctccggtatttaacgggtctgttgatgggctgctagccggtatcagtagctacagcgggtacagctcctacaaagttactctgtttaatcctggggctactccaattacccctggggctactcgggctagcttggtgttgcacttctaatgcacagcgtaaaacccaggcccagtctaggcgagcaggtctatacctggacctgaaatttattagactcacgcgagcccctccctcaccctcaacgcgcccaattgcccccatagggggtgcctagcgtcaatttagggggggggggcactgctagggcctgctagtgcgcaccagcgggcctcagcgggcctgtgctgcgttctagggctatcgctagtgctaccctatggctatccctgtgcgttcactagggcgcttcctgtgcgctctacggggcgctggggctatccctgtgcgctccctgtgggccataggggtgcgccatgccttgcttattttgtgcgtccattgcgggcctgcctagtgcctgcctagtgggaccagtagtgccgccgtagtgggccagctagtgcgctgtagtgctatccccggtgctatccctagtacgcactaggctatccactggctatcgctagtgctttacattgtgctgattatatgctacgctgcgcgctccccactagggcgcacttccactatccagcgctctcccaatgctatccctttgctcttactttcattcgaaagctattatgaaatgaagtaaccggagtaggaggggtttagggacactatatacactactactcactatgcactccctagtatgtccctgtgcctacgcagtaggctgacatacctacacagtcaccgcatcactacgtggcttcactctcgttacgccactgcgttctgctctttgtagtattaggtagtattggctcgtaatggctagcagtggctacagctagtgccagcatagggctatccctgatgtggttctaagtatttaccctgcttaccctttttgctcccggtgataaaaagcttaaaaaagtgcttgcttcttttggttcaatgggtctatagttcaatcaccgggaggcgctgaggtgctaaccggggccgagccgggaggctccgctggattaaagctagatagtgcgaagggttagacactcgataaaaagagttgacaccgcgaagggcataagctagattgagtccaagcagtaactgaatatgtcgtgtaacagtaaatgcgcgattggaaccctaaccacgatagggcgctgagaggctaacagcgagataacccctaagaagtgatgctcatcggagtttagggaaacaggctggttgggaactaccgaataccccgagctggacagccagcaagtagtaagaaataaacgcttgacaagttctgattcactgagtaacttagatagcaagcagtaagctggttcgcggggaggcccagtaccttgactggtacgatgacgaccgagcctagataatcagttaaaaagagtaagcgtgccggacgttatcaccggggttctgaggcaaaccatactgccgaggcgagagcagctcgctcctctgaatcgagggaacaaggcgcggagtgtaccccgcaaagagcatataacatagcgtagcagtaacaaggctgcgctagattatgtactctgagaggtgagattatgcgcaaagcaaaacgcctagcattacggcggaatatgcagttatcacttaaccctaccgataacgtgccgcttactgtgaagcccagcaaacaagggttgagcggtgagcacagggtgaggggaaagcaaaaacaaaagggcggcagtaaacagcctagtgggtggcctactgttaactcccaatttgggcactaattacagcctatagcatcctatggggtgctatgtgaagtaattatctaagcaactagggaggtgccaaatggttggctacggtgaaggttaatagcctatagcgtcctacggggcgctatgtgaaattaaccgatagtaaatcaatcaaagaggtgtattatgacccattcaactggtaaagtattcaagctcaccgctgcgggtagcattcgtaaagcgctgggcgacgtagtggaagcaaagcgtaacatcactatcagcgcgctcttccacggtcttatcagcagcaacgtttcctgggctacggatatgcagcgcagtgacgctgctgactttgatatggtgctgcgtacgctattacccatcaagttcaacaaagagtccggtaagtacgagttcaacgctaagaagtgctatgcgtcggctgagaagctgggaatcgaactggacactatgcgtcttgactacaaacaagctgacaagcagggccgcgaagttattgttgccagcttctatagctcctgtatggccctgtacgctgccgaagcggagcaggtgaagaatgacgcgctggacgctgatgcagtgcgcttgcaagcgctggggcgcgttaaaaacgccattaagaaggccaaagagactggcgtaagcgacgcagatttggtgagtatgctcattaatcagggcgtggatgtacgtgctgtgctggacgcaactttgaaggaagtggcctagtagcaagcctatagcgtcctacggggcgctatgtgaatgcaactggcgtatgaggtttcatatgaaagcaatactggtctatccgggccatgaactctggcccgtgtggtgcaatcggatatacgaagaatacagctacactgtggttatattctctgacaaagacactaatcaggaatcccctttagaatttgtggatacctacaccgaaatggctgcccgcactgtgctggacgccgtgaatcttggcattatcaacgactggagacaactttatggttaacgtgttcaacatcattgtgaccagcgctatgctggtgctgggcaacgacgtaaacaacccggtgccctattgcacagtgcagttgcagcaaccggcggcgcagcaaccgcagccgcgccctgagtatgacctctttgaagaccccgagggtggttgcaaagagctgggcgcgcgtatccttgcggcggtgcaggagcagtacccggacgccgctgtaacgctcacggtggacggtaagagcaacaacgatatttgaggtagggtatgcacggaaagaatcctgagacgctgctgatgtgtaggcagcaaccaacaatcgaaggactggcgcgagagtacagcgcgaaggcagcgctgcgccagcactacgagaagcaagcgcagcgcctgggtatgaccttgcgaggctactgctaccggtttaatgtaaggggtattgtatgagcaaacagaacctgtacgacgtatacaagcgcccgaatgggctgctgtaccgggtgccgctgcgcagcccactgcataagcgcgcggagttctatgcaaagcatttgcagcggtggataccatccgggcacaaggttggtgggttaatatctagcgaccgcagcgccatcgtagcccgcaacgtggtgttcaaggacagcgtatgctcacagtagacgaaacagcgctgctgtgctggcgtctgctggaaacgcagggcaagtgcggctgcacttgggagacattcaaagaggttcctaatgaactcaagcaaatcgtgccagttgaacgtcgactactccgagttagaaaagagggggttggcactgtgctcacaacctaccgggagtatacagagtctgccgcgcggcggttgcaagagcacattcagttcgatgtggttgcggctctacggcggtacgggtatcgtggagcttttacgcaatttcgggccgcagtccgggcttattacaagcagcaacaactcgctgcgtggtacgcacgctgacctcgttattactgacgaactcaaagaatctattcaggagcaaatgaaaatgcaggaaactaacacagcacctatcgaatggaaagtagtattaccggaaggtgcaaacgcactgccaatgcgggggtcaatgtattcaagtggtgattactggacccctttcgaggacttgcaaatgcgaggctatgactacccgcacaccgagagcgcactgcaggcgcttatgggtctcctcaaagtcagcgcaaacaccccaggcttagaggtatctataggtggggcactgcatccgaaatatcgtgccatgtacagggctgccggtccgttgcaacgggtggacttgtgccgttcaggaactttctttgaactgcttgccccggcgcgagtcaccattgacaacaagttctgggaacgtcgccgcgacttctatgaggatggcgacgtagtggttgagcgtgtacttgctagcgtagaagcattcaccggttacaaggtgcacaagcaagccctgcagttattcgaacgcattatgcttgcgccagaagagcagcagcgccaattatacactggctacgattacggtagccacatcagagacgtgcacgccgtgggtctgctcatgaagctgcacggtttcgtagtgtctagattcgctgttccgttgggcttcggtttccgcaacggcgagcccatcgtgatgctggggcagccgcggatgcacaaggatttcgctgcggttactgagtaccgctgcgtagagatgcgcgtaggtaagtggctcgccaattactacggcaacggggttgacttccgcgacgccatcgaagacctcaaggctatgaacgtagagcctacaacgtacctgtgcaagaccgagcaggaatggtatgacgcctacgagaatggcccaagtagctgcatgagcgggtactcatttgagcacagccctgtgcgggcgtatgctacaaccagccacgggctaccagataacgggctgcgcctattcatccagtacaccggggagctgttcggggacgacttcgaagtgcaggcacgagcaatcgtaaaacctgaaaccaaagagtacgtccgtgcttacggaaacgctgcggatgcaatcctgcgggggcatgggtacaccagaaacactgaatgtctcgagggggtaatgctggcgcgcataccgcacccaacctacaacggcgcagtgctgatgccatacctagatagcagccagtgcggcgtagatgagtatgaggatgatgcctttgtaatccgtgacgcctacgagtacgaggcgcaggaatcagaagggtacatttacgttggcgcagagtctgcccggtgctgctgctgcggagcgcgcttctccgtcgatgacatgcaggaaaccgcaggtggtgatatggtctgcgacggctgtgtagaagatggggactttgtatacgcagttggccgagaagggctgcataatcgctggagctgtacttggtctgattaccacgacgcctatgtatatgacgcggacattgagcactgttcggtagaaggggtagtgcatgaccaagaagagctggtgtttgcacaggaccggcaggtgcttattgagcacgcagaagaacacccagtgcacgggttaattctcactgagcatgcagctgattgcttgggagagaagtacctgggcaacgatgacgaagaagtagaggaggcagcttaatgttcttgaatccgcacgggattgatatgcagctgctcttgcagatactgcgaacgcaccggcctagctgggcaagcactgagtggtttgagccgctgcttatgcaagcgctgggtagtggtatgcactacgtaaaggacaagcacgggaactacttcgtgctggtgggggactcagagcaaagcgacgtagcgtttacgtcgcacctcgatacggtggcccgtccaaccagcgctgcgccggacgttggttgtactaacaagggcgtactgttcgtaaagaatccgcagcaagctgactgcttgggtgctgactgtggtgccggtatctatctgatgctggagatgctgcggcggggtgtgcacggacgttactgcttcttcgtggatgaagaggtgggctgcgagggtagcgctgcatcggtcaaggatgactctggattttggactggggtcaaggcgatgattagcttcgaccgccgcggcgacggtatcattacgcatcaaaggtatatgcgctgctgctctgacacctttgccaagaccctagcagagcgcctgggacgcacggagcagcacttgcagaagggtgtgtatactgactcagccgagttcgttggcatcattcctgagtgcaccaacgtcggtgtagggtacatgcacgagcacaccccggatgaggtactggacctgaacatacttgggcaagtgcttgagcgggtactgcaagatggtacgttcaagcgcctaccgattgagcgtgacccgaaggtagtggagccggaccagtggctctctgcatctacgctcagtttacggcagccgtgggacctgccaccggacgaggacccgcaattgctggctgcgttccgcgtagtgtcgcagctttctaaacaacaactggttagctgggtgcaggagaatccagagaaggcggcggagtacataatggtgttctccgattacggctttaaagaagagctgattgaactaggcacccgagtcgtagaagactggggcggatacgataatattgtggagggttgattatgtctaagtttaaagttggtgataaagttgttcgcaaagcacacaaaaacacttcgtcgttcaagtcgtacctaggggattttgcttactacgtaattacagatataactacaagcggccactggctgcagttggataactttacagatgggggagccgacccctacccgtggtacgcctataacttcgagctgtatcaagacccgaaggatgagctgccgccagtcccggacaaggtggcctacatgaactctaagcgcgacccgggaaatgaccaacgcctagttcttgagaaggataatggggatggggaaggtttaatgtacatcggggtagttcctaagaagggaagcactcgggcaaaggttgagattgggattaacatcgaccccgattcagccctgcagttggcacacgacctgcgccgcatggctatgtcggttaagcgcgagcagaagtaatggaccagccctggcttagagcgtgcaagcgcctggccgtggggcagagggcgcgctttcggtgctgcggcagggacgccgccggggtgctctacaataacccggatgcatgggaatattattgccaccgctgtaagcaggtgggcaaggagcacaagcagtaccagcgcatacagttacaggaagagccgagggtgcagccctctgcacctgcagatgcaatttgcattagccaagcgcctgcggaaacgcagagttttatttacggattcctgaccacaaagggaatcatgcctgaaatggtggaggatgcagaatggagcaaagagaaacagcggataatcttccgtgtcggaagcgctgctctgggccgtgcagtgcatgcccgacaacaaccgaagtgggtaatgtacggccatccggtaccgttcgctgccgcggcacctgccgtagcaccggctgtagctgcggccgcgcctctaaaggtcgtgctcaccgaggactatctatcagcccggaagatacagcacgcagttacgagctacagtgcgttgaacgtgcaggctatagctatgctgggtacacgcttgcccacgccgctgagggcttggctgattcagaatcgcccggaagtggttctgatgctggacaatgacccggctgggcacgctggggtagcggcagcacgccgagcattgcgcccgttcatgcagtgccgggagcattacttcgctgcggacccgaaggacgcagaaattaaagagattctggaggctatacaatgcaaccacatatccagagggagctagttaacaaactaagggacgcggcggtgcgctatcatgggacacaacagcttcgggcagtaatagctagactggtacaagaggcgcttgaaggaggtaagaattggaccttatagttgttcgtgcgatgtgcacgcagaaagtgtggactcgcttgcgagagcagattcctaagtcgatgcttgcgccggacacttcgaaccttctggactgggtggggttgtactggaacacgtacccagagcaccaggaggtgcagtgggatgcgatgcagagcatgctcaacctccgggcggggcacttatcccgggaagagcgggtaatcatggacgagcttatgcggggagtacaagccgtgccgcaggattctgtggtggggattgtccaaaccctgaatgagctggcctacagcggggaggtagcggcgcttacgcagcgctaccaagacggtgaggagattgattacctcctggagatgaagcacctgcagcgcaagtacggtgatggcgctgcggtgcatgattcgctgcttgaatgggagagtggtagtgttgacgagatacttgccgcgactgatgagagcggcggtcttaaactgggcgtgttcgagcaactcgctagcaacatccgaggtctacgtggcggggactgtatcgcagtggctgctcctgtggactctggtaaaactagtctgcttgctgctattgctgtggattttgctgagcaaatgcagcagcagccggaagtgtacggggaccgccctatcctctggttggttaacgagggcccagcgacgcgcacagtgccgagggtatatcaagcggcgctgcattggactctggcggagattaaggaccggcacagtaagcaagagttcgtgccagcctacctcaagaaagtaggcagggctgaccggattcgtgtcaaggctgcgcactcattgacgatggcgcagatatccacgctcatggaggagatgcgccccgcggtaatcatcatcgacatggtggcgaatatccgtggcggcactatggagagtgagcaccagaaccttgaggcgaaatggcaggagctgcgtatccttgggtgcgagaacgactgcgctattgtaggcactatgcaactttcactcgaaggttacaacatgctgttcccgccactcaccgctatgaagcagagcaagattggcgtgcagggtgccttggacttggcgattatgatgggatgcttggacaggaacgagcagccgcacatgcaaaacgtccgtggtatcagtactccgaagaacaagatggcactgtctggtaaagaatcgctcctgcaattcgaggtgggattcgagccgggtcgttgtagatttgatgagggccaaattaatgtctaagtttaaagttggcgataaagtaaagcgcagcaccgttgtgccgcgtgatatattctaccgcactggcgtgaagattggcaggacttacactgtgtgcgccgtaagtgaaagcggcgcctacataggactgactgaatctaaggagagcacattcaactttgatgcttatgcgttctctcttgtatccaccggtgctgcttgggacgtaaacgaagcactgcgcctgcgcgggttggcagtacaagcgatacaggagtacaacacttacctactgcagcagccgctgctggaggctatcgaacctccgccaccaatcaagtgacttccctagcgccttctacgagggcgctatgtaggtacacaggagggtttatgcaagtagactatacaggggttatccaaaaagcggattacacaggacttatacgcggtagttacgtggtgcgacaccgcgttaccggggaattttgtaccgtggaactcggggcacgttacaatcagagagagtgggatattgtagggcctatatcactgctgggagatttactagtatgcttaaaccgtcagacatcaactacctagacgacgaggtaatcaaggcgtacgctgcatctgcaggtactttccgtaaacgattcgcactggacagcagccagctgattgtgcatctggctatcaacaaggctcggagggctaagtggaaatgaattgggatatttggtttacctacaaagacggcaaactctactggaagcacgaggttagaagtgggcgcggacgcagccacctaaactgcgccgcaggttccgaggcaggaactctgaacaaagtacatggatactggtacgttaagctgcataataagctatacaaaagaagtttgatagtatatgagatgcacaacggtccgctgcgagcaggccaccatatagaccacataaatcataacaggttagaagataccccagataacttgagggcagtgcttcctgagaagaacatgcagaacaagtccctgtatagaagcaaccgcagcggctatgtaggggtgcacaggaagagaggtcgttggatagcaaccctaggaaataaacaattaggttcatttagcagtatagagcaagccgtagagtgtcgtagactggcagctgaggcggcggggtatcaccataatcacggggttgcagtatgactagcagtattatgactatagaccttgaggtcgagaataatccttactatggtagcaaggctagcccctactgccctgacaactatgtagtgcattcggcctaccgcatagaccggaccgaggatgacggcacagttaccgtagaaccgacctttgatatcagattcaacagcaagcaggaattccttgacgacgtagccggggagcatctgtggttccgcataccttctgattgctggtgcatcgtggcccacaacgcagccttcgaaattagctggtttttaacatatcagcggcaacactttgaggaattcctaaagcgcggcggccgcgtattcgacacaatgcacggggagtatattgtgtctgactttcagagtatgtacccatccttggatgaaactgcgccaaagtatggtggggagcataagattgatggggtaaaaatattgtgggaacagggtgttctgacctcgcagatagaccccattcttctcagggattacctagtcaatggtgatataaagaacacggccctgtgcttctacggccagtgtgctacgttcacccagcgcaatcagatgcagtacgtgtgggagcgtatggatgccttgctggcttgggcgtactgcgaatggttcggcctgttcgttaatatgccaattgcgcgcaagaaccaggaggagcaggagcagcgcatctgtgagattaagcaggagctgcagcagtatatcccgaaggacctaccggagactctggatttcaacttcggctcggactttcatatgtctgcactggtgtacggcgggcctatcaagtatcgcaagaaggtgccctatgaccctccccagtacgtcaaggccgactactggcaagtcggggacacttgggttgccgtggatgacgtgcccgcaccgccaggtgcaaccacgtacaagtccggtaagaacaaggggctaccaaaagtattccgccttgatacagaggaggagaaacttaagtgggaggatgacctttacttctgcccgggcctagtgaacatccaggagctgccggaagttatccgggagaagtatgcggagcgtggagagttccgacaggcgcgcaccctgcaggacggtacgccagtatacagcaccagcacagacgcaatggaggcgctggcccgccaagggttcgagttctgtaagttggtgaatgagctggcggcgcttgagaaggacaccggtacctactatttacgggaagttctggatgcaaacggagaagtcaaagagcggaagggaatgctgcagtacgtaatacccgaacgcccagatggttccggtatcatacaccaccggctgaatacttgtgccactgtaaccgggcgccttagtagttctaacccgaacctgcagaacctaccccgcccggatgaggacggggatggggtggctaaatccaaggtgaagcaggtattcaccagccgattcggtgataacggccgcatcactgaggttgactactctgcgctggaagtggttatgtcctgcgtgcatacaggggataagaaactgctgggcttgctacaggcaggtacggatatgcactgttaccgcctcgctttccgcgagggactgccgtatgaagaagtatatgagcgctgccacaacaagaagcacgagctgcatccgctttggaaggcaatgcgtacaagtattaaggctcctagctttgcagcccagtatggcgctacggctaaggggattgcgtttgctactggatgtacggtggaatttgcacaggctttcttggacaacgaggctgcgctgttcccgcaaacaattggcttccgcgctgttgttaaggaagaggtagagcgtaccggtgcggagggtcgcatgtaccgggagcaggcggacgacggcagctatcgaatctaccgcattgggacgtggaccagccctgctggtgcccgctacagcttccgtcagaaagagcagtggaaggaggttgtgcctgggcagcgtaagcagaaggtcatggactacaaggaaaccgagatggcgaactactggtgccaaggggaagcattcttcctgatggcggtggcggctggtatggttctgcgtgcactcttggcccgtgactggttcgacaatcaggtgtgcctgattacgaacgtacacgatgcattgtatctggacagcgccaacccggaggttggacgtgaggcgagcctgctggttaagcagtgcatggaggatgcacctaagcgtatccaccagctctggcctaactacggtatcattggcgaggtgcccttcccggcggaagctgaaatgggtacgagcatgtacagtaaggagaaggtagaatgaatattaaacctggcagtattgtggagatgctggaacttgggccggagcctatcgacccacgacatcgtgcctactttgcaccgggtacgcagcatcgcgtgatatcttacgacgttgaattcggcgaggtggagctactcaatccggacagcaactcagagaagcctggggacggcatcaccttcttcgctggagagtacaagctcatcgcggagtagtgataggtggacccttgggtggtgtagggggttagggtagcatggaaatatgctagggtcaactaaataattaaataaaattatttgttgactctggcttgattctgtgattccccgagaattaatgtgatacgagtaggaacaacacaagagaggcaaccttggctaaagtaagtctaatcaaactgtggaccaaagaagagcaccaacaaattcttggcagtttcctaaataacactgatgcagctattgcgtacaataacaaatttcgcaggggggacgtaatcgtgtctcgccagcttgtacgctactggcgcagcatcttcatggataacaagggcagcaaggccagtgccaaccgcgggctgcaggaggcgcgtaagctaatccaaccaagcccaacggacgatatcgggaatacaaaggtgccggatatgtgccaccgcattctggttgtcggggacctgcacgctccgtatacccacgtagacgcaatgccgttccttgagagcgtacgtgatgcgtactgcccggacatggtagtgcaggtgggtgacgaaaccgacgggcacgctatcagcttccacgactctgaccctaacctggatagcgcaggggtggagctggagaaagccaagctcgtactggaggagctgcatgaactattcccgaacctgctggtttgcgattccaatcacggctcactcgtatatcgccgcgctaaagctcacggtttgccagtgcaatttatcaagaagtaccgggacatcttattccctgagcatggtgctccggcgtggtcgtgggccgacgcttgggtgctcaacacaccgctggggcctgtccgtttccagcatcaagtcagcggtgatttcatgctcaatgcatcccatgagcgcacctctctggtgttggggcatgagcatggacgcttcgaggttcagtatgctgcttcttcaacggcgctgtactttggtgcgtatgcagggtgcttgattgaccgcaagagcatggcctttgcttatggcagactcacccgcaagaaaccaatcctgggtgtgatggtaatcaccgagggttgcccgcagttaattccgatgctgctcgacgacgatggtcgttgggtagggagaagcaaatgaatgtactggattcaactgtcacccgagtagatgctcctgtatgggatgagcaataccaggtgtatcgtgtaaccctggagtatgactgctgggggcacaaatctgagacagagcggtggtataaagatgaagcctcagctcttagtttaaaagttggtgacataatcaaaacctaattaggagtgtcgatgaaaatgggaatctgttctgtactgggccttatctttgtaaccctgaaactgactggcgttatcgcctggtcctggtggtgggtactgcttccgttctacggcggtgtagctttgctgttggcaatcctggcggcaggcggtgtggcagcagccgcggctgcaggcattaaatccgcacttaagaatcgctaggccggacctgcatctgcacgtaaatatcatttaaactaaacgaggacgtaattatatgactacgaatgtactggcatccctgaacgctctggtagacgcagcaatcgaaacccaagatgtggatatgcgggaaaccgcacagggtggtgcgtacgaggacgtgctgctgccgaagggtgaatattacggttacttcaccgagtatgtggaaatcggtaagcgcctgccgaccaagggtggtaagcctaccggtaagcctgcagtggctaacgtacgtatcggcattgtagtgttcggccccaacggcgaagtgaagcgtatccgcccgtacccgatggctatcagtaactttgagcgagcaggcttcaagaagttcttcgacaagctcaactacgacaatagcattaagcatgcagcgcagcgtctgggccaggccttcaccttcccgattgatgagcacaccagcgccgcgggtaagaagtcgaacatcgtggacctgtccggtatccgcccgattcctaagttcgacccgaacaccggtgaacctattaagatgccagcgctggatgcctccgagattaagctgttcctgtggaacaacccaaccaaagagacctgggacagcctacacatcgaaggcaccttcgacgacggtaagagcaagaactggattcaggaggatatgtacaaggccgtagacttcccgggcagtgctctggatattatgctgaacgctggctctgttccgagtccggcagctatgcaggcacctgctgctccttctgcaccggcggctcccgctgcgccggcagccccagctgctccagtggctcctgcggctcctgtagcgcctgtagctccagcagcgcccgctgcacctcaagcctaataaaccctaatcgaaactaatacggcccctcctggggccttagaggaagcctatgaacatcatcaacatccttatcaaactcctgagtgcagcctacacagcagaagctaaacgagcagatgccaaagcgcagtttaacgagcagctgtcagttaaattcgcagacgacgcagtacgtctggccgctcaatccgaggcgcgagtagaggcctccaagcacagcaaagaggtagcagaagcgcatgcttgtcatgctgataacctgcgtgccaagcgtgacgaagtagctaacttcctgggggtataaatgcgcataatcacatgggccaaagaacagtacgctgtgtttctgcttctgcgcgcacagcgtttgcagaagcgagcagacgactggcgctgggcagctaactctcacgcatacagggcaagccttctgggtcccgagattagtgcgcagcgttatcacttgaatcgccagtgcgccaagtcccggcgccgtgcatatgccctgggcgcagaggccacggccactgagaccaaagcctacgccttcattcaaaaacacaaactgaaaggatttgactaatggataaagtattagaagcgtacgagaaccttgccattacggtcggctcagcggtatacgatgcagcggcgtatggggtgcttaatattagtctggacgacatctacaacgcactagatgagctggcggccctgtacggaatggacctggacctggccgctacagccttccgggagcacaacgatctggcggcacatgccgataagttacgaggagacgaccttgtacttatccgcgtagtgggcacgctcagcgttggcctggcggagattggctcctgtatctacgacgtagaccagagcctgcgtactccggaagtaatcggggacatgctcggcaccgtgctggtgctgtctgaactggaggcttaagtatgttgtacgtatctcgcgcaatttacgtagctttgattctcccgctgattccattggcgggactgtgctaccttggcgataagctgagcaaggcaaagtgggcagaacgttgggttaactgggccgacaagaaggcccgcgatattacggggcgctgatgattatcaacggggttgacttgtcccagcttagcgagcagttagctccgcagaactctgggaagattctgctgtacgatgcggatttttgcgtgtacaaagccgccgctacagtaaaacgtttggataccgcaatacgccgcttctatcagctggtgcttgaggatatgttcctggtcggctgctcagaggcagtggcgtacctgacgcctgcaggatgtgctaagtgcttgcgctggcacctgcctacggctaagccctatcaggggcagcgcgctaatcgacaggagctaccgctcaaggcaccgttgaagcggcacctgattgagaacccagaccagtattctgagcagggtattcaggtagtcagcagtgactacttcgaggccgacgacctctttgtaatggattcgtacagcttcggagaccggggaatcctgatgtcccaggacaaggattcttggctcagccctatggctcggttcgatataccgacaggtacagtgtggcctgcactggaggacccattcggatggattaagtgggatgacacccaggctatgcctgtacgagcacacgggttgaagttcttctggtggcagatgctagcaggggacgacgcagataacgtcaaaggcatcacgttgcttgatgggaagccctgtggcaagcgaacggcctttgatgctatctaccctattacctcagagcaggacgccgcagaattcgtcgtagcggcttacgctcgaaacaaccaagacgtactcgcagaggcagaatgcctgttcctgcggcgctccccgtcagattctgcctatcagtatctgatgtcactgttgactactcccagtctgcgtgactgggtgcattcgctgcacgagtaccataaacagcatatacagtggatacaggagcacccagacaatggcgaagatgtctgcgaaggaaatgagcctgcgggcgattgagttatactacgatgggaaacacgatgaacttgaaactattctggatgcgctgcgtgaacgagcacccaaaacacatcgaagaacggttgagcacttggattctctcattcacgacaatgctatgctggatgtagttggggggattgaggtatggtaatgagtacaccttgtatagaccatgggagaaaggggcggccaaagactgggttcctatccgcgtgggtgcttattgacggtaaacgccaacctacaaccgcacacaggaaggcgtactatgaacacacaggagagtggcccgaagtagtacagcacacctgtggaaattctcgctgcattaaccctgagcacctgcatggagggacccacaaaagcaaatcagcaaagggttccagcagcggccgctcacgtttgaacgaaggtacggtgcgctatctgcggcaaatgcacattcctggggaccgggaatggggtagcaacgctatagctagacgcctgggtatggctcaaagtacggtatatcgtatgttaagagggatttcatggcgctgcgtaaaataactcgagcacagattcgctctgtggctattaagcttgccaaagaccagggaggtatatgcctcctctgcggcaaacctttggacttcacaatcaagggggtaactggtgattctgttgtcgttgaccactgtcatattactgggcgtattcggggtgctcttcatcgctcgtgcaatggaggggaaggcaaagtggcatctgccgctgggcgctggattgttggtagcatgcaatcttctggggctattgctgaatctctacgtagggtcgccgattacttagaccgagaacctacggatatgctatactatacgcacaagacgccggaagaactagcacaagcacagaagctcaaggcccgcaaggccagggcacgacgcaaagcacgggagactgttaaatgattgaatccactaaattctatgcaggtgatttggttgtgcgcaaagcgagtcacgtagggggtatctggaaggacatctgtgaacagctacaggtagacctagactcccccagattagtgacgtgcgcagaagacggacttataaccttagccgagtgtgggacctcttggcgagcggggttcttccagctcttccattcgaagagcgaggctgtttctgactcagtgaactctcctcggcactaccagttcttcccggacctggaggcaatagaggtaattgcacgcagcatgacgcaagagcagttctacggctattgtctcggtaacagattaaaatacagactctgcgccggtaacaaggatacactggagcaggacattgctaagtccgataagtacccagaactgtatgagcaacaccgaggtaagtgcattgacgcttagtgcatggtgtcatgagatgtggcagagggtagtagagcggcgcgacaaaaagcacggggaggggctattaaatgaagacagtaatctttgatttggacggtacactagctgatggcgcgcaccgcttgcacttgctgcctactgtggatttgtatctgactgacagttggaatgagttcaaccgggcctcgaagtatgatagccctatccacagcactattgaagtgtgcaacatcatggtgcgggcagggttgcgggttattatcttgacggggcgctcggatatagtaagagcggaaacagaggcctggcttgagcggaacttcgttatgtactccgagctggttatgaggccgcacagcgacaaccgaaaggatactgtcatcaaagaggaatttctgcgtaaccaagtcgggctggaaaacattgtggcggcttgggacgacagccccgcggtgattgagcatttccgcggactgggtattaccacttacgctgtatgcgactatggtgcagcaacacatcgaacagacttaaaatcccacggggtggaggaattagcatgagtgcagtaggtacaggcatgaagtatgacgcaggcaaacctcgaatggacttgctactggacgggtgcccgaatgcgttgctgcgtatcagtgatgtgctgaccttcggggcccagaagtatgcggcacacagttggcacacggtagccgaaggtaagtcccgatacaaggccgcgctactgcggcacctcacagcacacgctctaggggaaacactggactcggagagtgggttgccgcacctggcgcacgccgcttgttgtgcgttatttattctagaactggagcagatggatagtgcggccgagtgagtggtgccacatgatgtggcagaaagcagtagagcgaggcgacgaacgcggcgctaaaaactacctggagatgtataatctctgggtaagtcgaaatcagtagttagaagtaccggacataaccaaggagactaagcgcctatgattagcgccctgaatacggttgtagtaccagaggaagcactggtgaaacgccagctggagcttgaagagacctataagattcgcggaatcgagcgcgcgcgtaagctgattacggacgcgttgcagaacggtgggattatgaacctgccgatgacgcagcgtatgctcacctcggcatacgaggtggctgctaccgctatcgacgagatgcgaaatgtcaaagccccgggcatcggtggtaagtaccgccggttcctgcgcttagtacccttggatgtcctgaccaccctgagcctgtgcacaatgtttgaggcgttcagtgtcgccccaggcgagtccgctagtcgccgccagactgcacaggcggtaatgtctgcgctgggccggaacgtgcagtcagagctactggctctgcagttacgcaacgtagccccagcgtacatggaccgcgtgtatgagtacctcacagagcgccgtacgaagtcccctacgcacatcctgcgtacgctccgtgccagtgccgagaacgtacactacgggcacgagccttggaccaatgcccagaacatctccgtagggcgtctgctgtgtgccgcagtgtttgagacgggactgttccagtggaagaactgtagcgggaatctgagcatgctctatccggctgatgacgttatggaggccttccagaaactggtagagtccgctgatactgtaaccatgaagccgcctatgctgataccgccggtgcagcacactactctgtgggatggtgggtacctcacccctatcgacaatcgcggaacctaccataacgcgcacattgacagagctcgtctccgtgaagtagcggaagcatttaagtccgcggacggcatcaaaaaagcgcttaataaggcacaggaaaccccgtaccgtattaataagcgcgtactggaactggtgcaagaagcacgggccctgggtgttgggataggtatgcctcgctcagtaccggagccgaaaccggagtggtatctggacggggttccgaaagagaattacactgaggaagagcttgaccgcttcggtgagtggaagacgcgtatgtctctatggtatagcgccgaccgtaagcgtgtatcgcaactgcgcagccttctgactacgttggaaatggctgaggaattcaaagatgagaaagccctgtacttcccgacttgtgcggactggcgctaccgcctgtacttcaagtcctctctgcatccccagggttctgatttgcagaaagccctccttgaatttggtaggggcaagccgctgggggagcgtggcctgttctggctcaaggtgcatatcgccaattgctttggttatgacaaaaccctattcgaagaccgtgcagattgggttgatgcaaatattggtcaaatacgagagttggtacacaatccatttagttcggatgcttttaggtcggccgactcgccgtggtgcttgttggcagcggctacagaccttgttgctgcacttgattctgcgtgcccagaagagtatattagccgaatcccagtggctatggacgctacgaactcaggtgggcagcacctctcagcgctcctgagagaccctgtgggcggtcgtctgacgaacctgtactgggagggtaatgacaagaaagcggacctgtatatggatgtgaagcgccgtacggacgagaaggtgatactggacctggacaaggaggatttcgttatccagagcacttactggagagagaacgaaatcacccgcagcatgaccaagcgccccagtatgacctacttctacagcgccacggtgcgcagctgcagtgactacatctttgaaggcgcttgcgctgaggggtatgaaggtaccgacactaacagtctatggaatctgtcgtgctacctggctccgcgtatgcgcgccgctatcgaggaggcaaaccctgctgctgcggcagttatgtcgtacttgcagaacctagctagacgtgtaccggcaagccagcacctgcagtggtatacgccgctgggtgggcttgtaatgaaccgctacacacagcgtgaagaagtgcgtgtacgtattgactgtatgaatctcactgtcatgcgagtgcataatcgagattttaagacatgcaacaagcgtaaggcggcctccgggattgccccaaactttgtgcatagcctggatagtacgcacttgatgatggtgctctgcgctgcggaggggttggatattgtacctattcacgactcgctggctactcacgcagccgacgttgatgctatgcaccgacacatccgtgaacagtttgtgcgtctctacgaagagaatgacctgcttggggatattactcgcgcagcagcagcagccggggcggacttgacggacctggatatgcccgaggtgggtactctggacatccggcaagtactggaatcgcctttcttcttctgctgataaatgaagttaccggagtaggaatgaagttaaaacacactagtaaaacttccgattacactctcaaggttctgtataagtctgacgacattacagacgcagtgaggcaactgcacgaactgggccacggcattagtcggggcctagctccagagcagcactactggagagtactgggcagcatactgggtaaacagtatatactaggagtctatgactcccaaggcgacttagtcggtgctgtcagctactacccagaagctgtagaggactgtcattacgtagagcctgtgctgtatacagacttcttcgtattgaagccaggtaacagtaaggcggtacttgtgattatgcagggccttcgcgcaatagctaagagtatgcgggctgggcgtatcgccattagccgaggtgcatcggataacacatacaatacaacttatcatttagtgaggtcagaatgagtggtggtttaggtaaactgttaggcaaggccacggatatgctcggccttacggacaacgcaggattagaggcgcagcagcgcttggcagagcagcaggctagcgcagcgaaacaacaggctgccctagaggctaatagcgccgcagataacattgcggagattgaccccgcaggggctgcctctgcatctgcagatgcaattacgtctgagcagaagaaacgacgacaagcagggcagagcaatcctctgggcctgtaagggggtagcttggaacaaaaagcaacattagcagaactctttaagaaggaccaggacgcaggcgtcttggatgcctctgagaagttcgcgcagtggacactcagcactatctttacccgggacgattccctggacggtagacgcaggcctctggagcgtgactaccagagcaccggcgcgcagctggtcaacactgcagccactaagattgtagggtcactgttcccgcaaggcactagtttcttccggttctccaagagttcggacctggacgagttcattagttcgctgggtagtgcagctacagcagaatctaagctggctgaggtcgagaacacggcgtcacagaaagtatttgagaaagacggttatgctgcgaagttgcaagctgtgaagctgctgctggttacaggtaacgcgttggagtatattgatgagcggacaggtaaatccatcgtctactcagtccgtaactttaccgttcgaagggatggcagtgggaacgtcctgcgactcattatcagagagcgcgcaagcatccaggacctgccagaagatttccgcggcaccttctaccgtgacaaagacccatacggcgacgttgatatctacactgccgcttgtcgcaaggttaagcggacagaggaaggcgtagaggtagtaagctacgaggtgtaccaagaagcagacggacaccgtattggggacagcagcacctatccggagctggaacttccatacaacgtgctggtgtggaaccttgttagcggcgagcactacggacgcggcttggtagaggactacgccggggactttgctcggttgtcggtactatcggaagcattaactaactacgaggttgagtctgcgcggttaatcccgctggttgacgcaagttccggtctggatgtagatgagttcgcaacgtcggagacgggcgaggctgtgcaggtgggcggcggtggttccaacgggaacagcaaatcccccgtcactgcttacgagggcggctctgcccagaagattcagtggattgccagcaacatccagatgctcgaacagaaactatcgcgtgcgtttatgtacactggtaactccaggcagggtgagcgtgtcacggcttacgagattcgccagaatgccaaagaggcggaagccgctatgggtggtgggttcagtatcctgagcgacacctggctgcgtaagctggcgtacttgtacactgcgctggcgtaccctcgctttaagctgtacctcagcgaaggcgtagtgagcatcaacgttactgttggcacctctgcactagctaaagccgcggcagcggacaagctgttagaggcggcgcagtccatgcagctggctatccctgtgctggagcagattactccacgcttcaacaaggatgcgtgcgtagactggtacttcgacgcctatggtatcgtcagcgagccgttcatgtacaccgaagagcagctgcagcagaagcaacaggttcaggatgcgtctgccgatacgtccgcaggtctagcacaggaccaactccagggcttgacagcagcagacccgacagtagcaggtaagcagctgggcttattaccaagttaacaaccgaggcatagatggataacgtagaaaacggtcagaacgtagaaactacacaggtagagaaccaaggtggccctaagattccgggcctaggtgctccccttaacgcccctaacaatcaaggcgtgcaggatgcacagacccctacccagcagcaacagggcaaagattcccctgaccctgctaagattcctctggatatcgaagccctaaaagcggccctggataagggtggcgatagcgctaaagagcagccccaggagctggctaagacaggcaacccgacgattgacgccggtgtagctatgttgcagaaagtctctgggttaactgactctgatatggtgcgggcacttggcaaggccctggagtatcaggaccctaacctaatcgatacgaccttcattaaggaacgtttcggagagcacgctgcttatgcagagttgctggctaaagcgtacctggaagaccaggttggtcaagccaccaaagcagtacaggaagcttacgatatcgtgggcggtaaggagaactgggaggtagcagcgcagctgtttaattccaaggcccctgaacctcttcgtaacgcggctcgtgtactcgctaactcgggtgagctcaagcaggccgctgagttggtagcaagcttctgccgggatatgggtcttatcaagacacagaacccaatggtacggggcgtggccagcaacaatgcactgtctgctgcagaattccgcgcagaatataccaaactccgtcaggaagcgggcaaccgtagcttggcgtccccacagttcagtcaacgttataacgatttgctcgcacgccgtgaagctggtaagcgcgtaggtctttaattttatttataaaggaaactaaagcatggccaacactatttataatggcaacctgactcgtccgcactggggcggagcggcgtctgacgtagatattcaccttgaagtgtatcagaacgaagtggatacccgcttccagtaccaggctctgttcctgggcctctccagccagcgctctatcagtggctctaacacctaccgtatcgaccgcctgaatacctcctcggtgaaaggtcgtcgctccggtgaggcgctggatagcactccggtccgtaacgataagatgattatcgtggtggatacggtgctgtatatccgtaacccgattgactaccaggatgactggaccggtccggacttcctgaccgagatgggtcagaacaacggctctgagttcgcagagaccttcgaccaggcgcacctgattcagctcatcaagggccgctcctgggttgctccggcgcacctgaaaccggcgttcaacgacggtatcgaggtaggcgcagctattctggttccgggtgccaccccttccacgcagctgacccaggctgagatggaggcgaacgccatgaacattaacctggcccacaaggctggtattgatgaactcatcaagcgcaaaaccccgctggcggatatgattaccctggtggatgtcgatacctattcgcgtctgctggagcatccgaagctcctgaacctggactttggtgcatccaacaacgacggttacaaagaccgccgtgtagtgaagatgaacggagtgcctgtagtagagtgcacggagttcccgaccgctgctggtacgcacccgctgggctctgcttacaccgtcacctctgacgacgcgctgtgccgtatggtgactttcagcaagtccaagaccctggtgactgttgaagctaagccgttcacctcccgtatctgggacgatacgcgcgagttcagcaacgtactggactgctacgcgatgtacaacatcggcctgcgtcgtccggacaccgctgcagtgaccaagttcaccttcaccaccaagtcctaattggaggttcaatggcagtaattgctacgttcggtctggagaccctccaggctaatgcagctcagcgggaggcggttaaggccgccaccgatgtagcgaagaacatccaggtggcttcggttgaatctggccgcaaggctaccaagaaaacccgtaaggcggctgacgtagccgctgatactacggaagagtaatacgcgcccctggtgccttcgggtgccaggggctttttttttgtccctgtcttaagggtccaaggggtctttaatggaggaacaaatatgagagaattagatgctgtgaacctgacgctggaagccttgggggaatctcgcgttatggacatcaacaccagtaacccgagtgcggggttagctcgctctgcgcttgcacgcaatcgtcgcgggttactcagcacggggttctggtttaacgtggtcgagcgcgaagttacccccaccactgacggcctgattaaggtgccgtggaaccagctggccgtgtacgatgcctgctcagactccaagtacggggtacgtgacgggaacctgtacgacctggtagagcagaaccaatacttcgatacgcctgtacgtattcgcgtggtcctggatttagcctttgaggacctaccggagcacgccgctatgtgggtggctaactacaccactgcacaggtatacttaaacgacctgggtggcgacagcaactacgctaattacgcacaggaagctgagcggtacaagagcatggtgctgcgcgagcatctgcgcaatcagaagttcagcaccagcaagacccgctttgcacgcagaatccgccgcgctcgttttatggtttaaggagaggttatggcgcaatcattagaaggtaccattcagagcctactgcagggcgtctcccagcaggttccaagagagcgccagcccgggcaactgggggcgcagctgaatatgctcagcgacccggtttccggtatccgccgtagaccgccgggtgagattgtctgggaaagcacgatagataaccctgggcttgactccctgttcactgaatacgtagagcgtgggactgacggtaggcacctgctgattaacaccagcaacggtaactggtggttgctggctaagaatggaaagaccatccttaattccggcaatgacccgtactttgttaccaccgtaggccagacctctttgcagaccgcaagtattgctggattgacttatatcctgaatactgagatggctccgaacacaaccgtggacaatactgggcgcatcgaccccagtaccaccgggttcttctacgttaaatccgcagcattccagaaacgctggaacgtcaccgttacctctgcaggggtagactactcaggggactacaccgccccagctgctggtagtaccagcggtaacgctgaggaggtatctggtgcttacgttgctcagcaactgcgtgactctcttgtagcgaatgggttgccagctgggaacgtgagcgtacgtggcgcgtacctgttcttctatgggttaagcaactgtgtggtatcctctgacgcgggtgatacttacgctgtggtgtccaaccagtctcgtgtagaccaggagcaggacctgcctgcacagctcccagcgcaagctgacggagcaatgtgtcgtgtgggtaccgcctcgtctgagacagcatggtaccagttcagctacagcacccgcacctggtctgaggtgggggcgtatggtagcatcactaagattacgaacatgcctagagagctcgccgcggatgacaacatcatcgcgcgggattgggagggacgtttagctggcaacgacgacaacaacagcgacccggggttcgtagagaacggctacatcaccggaattgcagctttccagggccgcctggttctgcttagcggcagctctgtggatatgtcagcctctggtctgtatcagcgcttctaccgctctactgtgacgtcactgctggatacggaccgtatcagcattagctctgcgtctgcccaggattctgtgtaccgcaccgctgtgcagttcaaccgggacttggtcctgtttgctaacagcatgcaggccgttgtaccgggctctgcagtgcttacgcccaccaacgcaagcattagcattaccagcacctatgattgtgacagccgtgttaccccggtaatggcgggtcagacagtaatctacccgaacaagcgcaacgacagctacgcgggtatattggagctaatcccgtcgccgtacaccgctgcgcagtacactacgcaggatgccacggtgcacctacctcggtatatcccaggcagggtattgcagatgcaaaactccagtgtcaccaatatggccttctcgcgcatgtctggagagcgtaatagcctgctggtctacgagttcatgtggggcggaagtgacggcgctaagatgcaggcagcgtggcataagtggtcgttcccgtacccaatcctgagcgtacaggcgctggaggacgaggtgttcttgtacatgcaagggcccagtcccagcaacaagctcctgattgtgtctatggacccgcgtgaaggttatcagttgggttcagagtaccgcgaagcctactcggatttgcagaagcaagttcaagtacagggaggggtgttcactgttccggcggtattgcgcccggttgggtgggcggacaactacaaggaagagcttatcctaacgtacttacccggcaaccctatggggcctactgaggtcggcatcaaggagattgccggggagaacaccctacgggttgtgcgcggcgtacctga

SEQ ID NO: 52 - DNA, 43626 bp, Unknown
  source: /note="Description of Unknown: KP2M-P0212 Bacteriophage sequence"
atcgtggagcttttacgcaatttcgggccgcagtccgggcttattacaagcagcaacaactcgctgcgtggtacgcacgctgacctcgttattactgacgaactcaaagaatctattcaggagcaaatgaaaatgcaggaaactaacacagcacctatcgaatggaaagtagtattaccggaaggtgcaaacgcactgccaatgcgggggtcaatgtattcaagtggtgattactggacccctttcgaggacttgcaaatgcgaggctatgactacccgcacaccgagagcgcactgcaggcgcttatgggtctcctcaaagtcagcgcaaacaccccaggcttagaggtatctataggtggggcactgcatccgaaatatcgtgccatgtacagggctgccggtccgttgcaacgggtggacttgtgccgttcaggaactttctttgaactgcttgccccggcgcgagtcaccattgacaacaagttctgggaacgtcgccgcgacttctatgaggatggcgacgtagtggttgagcgtgtacttgctagcgtagaagcattcaccggttacaaggtgcacaagcaagccctgcagttattcgaacgcattatgcttgcgccagaagagcagcagcgccaattatacactggctacgattacggtagccacatcagagacgtgcacgccgtgggtctgctcatgaagctgcacggtttcgtagtgtctagattcgctgttccgttgggcttcggtttccgcaacggcgagcccatcgtgatgctggggcagccgcggatgcacaaggatttcgctgcggttactgagtaccgctgcgtagagatgcgcgtaggtaagtggctcgccaattactacggcaacggggttgacttccgcgacgccatcgaagacctcaaggctatgaacgtagagcctacaacgtacctgtgcaagaccgagcaggaatggtatgacgcctacgagaatggcccaagtagctgcatgagcgggtactcatttgagcacagccctgtgcgggcgtatgctacaaccagccacgggctaccagataacgggctgcgcctattcatccagtacaccggggagctgttcggggacgacttcgaagtgcaggcacgagcaatcgtaaaacctgaaaccaaagagtacgtccgtgcttacggaaacgctgcggatgcaatcctgcgggggcatgggtacaccagaaacactgaatgtctcgagggggtaatgctggcgcgcataccgcacccaacctacaacggcgcagtgctgatgccatacctagatagcagccagtgcggcgtagatgagtatgaggatgatgcctttgtaatccgtgacgcctacgagtacgaggcgcaggaatcagaagggtacatttacgttggcgcagagtctgcccggtgctgctgctgcggagcgcgcttctccgtcgatgacatgcaggaaaccgcaggtggtgatatggtctgcgacggctgtgtagaagatggggactttgtatacgcagttggccgagaagggctgcataatcgctggagctgtacttggtctgattaccacgacgcctatgtatatgacgcggacattgagcactgttcggtagaaggggtagtgcatgaccaagaagagctggtgtttgcacaggaccggcaggtgcttattgagcacgcagaagaacacccagtgcacgggttaattctcactgagcatgcagctgattgcttgggagagaagtacctgggcaacgatgacgaagaagtagaggaggcagcttaatgttcttgaatccgcacgggattgatatgcagctgctcttgcagatactgcgaacgcaccggcctagctgggcaagcactgagtggtttgagccgctgcttatgcaagcgctgggtagtggtatgcactacgtaaaggacaagcacgggaactacttcgtgctggtgggggactcagagcaaagcgacgtagcgtttacgtcgcacctcgatacggtggcccgtccaaccagcgctgcgccggacgttggttgtactaacaagggcgtactgttcgtaaagaatccgcagcaagctgactgcttgggtgctgactgtggtgccggtatctatctgatgctggagatgctgcggcggggtgtgcacggacgttactgcttcttcgtggatgaagaggtgggctgcgagggtagcgctgcatcggtcaaggatgactctggattttggactggggtcaaggcgatgattagcttcgaccgccgcggcgacggtatcattacgcatcaaaggtatatgcgctgctgctctgacacctttgccaagaccctagcagagcgcctgggacgcacggagcagcacttgcagaagggtgtgtatactgactcagccgagttcgttggcatcattcctgagtgcaccaacgtcggtgtagggtacatgcacgagcacaccccggatgaggtactggacctgaacatacttgggcaagtgcttgagcgggtactgcaagatggtacgttcaagcgcctaccgattgagcgtgacccgaaggtagtggagccggaccagtggctctctgcatctacgctcagtttacggcagccgtgggacctgccaccggacgaggacccgcaattgctggctgcgttccgcgtagtgtcgcagctttctaaacaacaactggttagctgggtgcaggagaatccagagaaggcggcggagtacataatggtgttctccgattacggctttaaagaagagctgattgaactaggcacccgagtcgtagaagactggggcggatacgataatattgtggagggttgattatgtctaagtttaaagttggtgataaagttgttcgcaaagcacacaaaaacacttcgtcgttcaagtcgtacctaggggattttgcttactacgtaattacagatataactacaagcggccactggctgcagttggataactttacagatgggggagccgacccctacccgtggtacgcctataacttcgagctgtatcaagacccgaaggatgagctgccgccagtcccggacaaggtggcctacatgaactctaagcgcgacccgggaaatgaccaacgcctagttcttgagaaggataatggggatggggaaggtttaatgtacatcggggtagttcctaagaagggaagcactcgggcaaaggttgagattgggattaacatcgaccccgattcagccctgcagttggcacacgacctgcgccgcatggctatgtcggttaagcgcgagcagaagtaatggaccagccctggcttagagcgtgcaagcgcctggccgtggggcagagggcgcgctttcggtgctgcggcagggacgccgccggggtgctctacaataacccggatgcatgggaatattattgccaccgctgtaagcaggtgggcaaggagcacaagcagtaccagcgcatacagttacaggaagagccgagggtgcagccctctgcacctgcagatgcaatttgcattagccaagcgcctgcggaaacgcagagttttatttacggattcctgaccacaaagggaatcatgcctgaaatggtggaggatgcagaatggagcaaagagaaacagcggataatcttccgtgtcggaagcgctgctctgggccgtgcagtgcatgcccgacaacaaccgaagtgggtaatgtacggccatccggtaccgttcgctgccgcggcacctgccgtagcaccggctgtagctgcggccgcgcctctaaaggtcgtgctcaccgaggactatctatcagcccggaagatacagcacgcagttacgagctacagtgcgttgaacgtgcaggctatagctatgctgggtacacgcttgcccacgccgctgagggcttggctgattcagaatcgcccggaagtggttctgatgctggacaatgacccggctgggcacgctggggtagcggcagcacgccgagcattgcgcccgttcatgcagtgccgggagcattacttcgctgcggacccgaaggacgcagaaattaaagagattctggaggctatacaatgcaaccacatatccagagggagctagttaacaaactaagggacgcggcggtgcgctatcatgggacacaacagcttcgggcagtaatagctagactggtacaagaggcgcttgaaggaggtaagaattggaccttatagttgttcgtgcgatgtgcacgcagaaagtgtggactcgcttgcgagagcagattcctaagtcgatgcttgcgccggacacttcgaaccttctggactgggtggggttgtactggaacacgtacccagagcaccaggaggtgcagtgggatgcgatgcagagcatgctcaacctccgggcggggcacttatcccgggaagagcgggtaatcatggacgagcttatgcggggagtacaagccgtgccgcaggattctgtggtggggattgtccaaaccctgaatgagctggcctacagcggggaggtagcggcgcttacgcagcgctaccaagacggtgaggagattgattacctcctggagatgaagcacctgcagcgcaagtacggtgatggcgctgcggtgcatgattcgctgcttgaatgggagagtggtagtgttgacgagatacttgccgcgactgatgagagcggcggtcttaaactgggcgtgttcgagcaactcgctagcaacatccgaggtctacgtggcggggactgtatcgcagtggctgctcctgtggactctggtaaaactagtctgcttgctgctattgctgtggattttgctgagcaaatgcagcagcagccggaagtgtacggggaccgccctatcctctggttggttaacgagggcccagcgacgcgcacagtgccgagggtatatcaagcggcgctgcattggactctggcggagattaaggaccggcacagtaagcaagagttcgtgccagcctacctcaagaaagtaggcagggctgaccggattcgtgtcaaggctgcgcactcattgacgatggcgcagatatccacgctcatggaggagatgcgccccgcggtaatcatcatcgacatggtggcgaatatccgtggcggcactatggagagtgagcaccagaaccttgaggcgaaatggcaggagctgcgtatccttgggtgcgagaacgactgcgctattgtaggcactatgcaactttcactcgaaggttacaacatgctgttcccgccactcaccgctatgaagcagagcaagattggcgtgcagggtgccttggacttggcgattatgatgggatgcttggacaggaacgagcagccgcacatgcaaaacgtccgtggtatcagtactccgaagaacaagatggcactgtctggtaaagaatcgctcctgcaattcgaggtgggattcgagccgggtcgttgtagatttgatgagggccaaattaatgtctaagtttaaagttggcgataaagtaaagcgcagcaccgttgtgccgcgtgatatattctaccgcactggcgtgaagattggcaggacttacactgtgtgcgccgtaagtgaaagcggcgcctacataggactgactgaatctaaggagagcacattcaactttgatgcttatgcgttctctcttgtatccaccggtgctgcttgggacgtaaacgaagcactgcgcctgcgcgggttggcagtacaagcgatacaggagtacaacacttacctactgcagcagccgctgctggaggctatcgaacctccgccaccaatcaagtgacttccctagcgccttctacgagggcgctatgtaggtacacaggagggtttatgcaagtagactatacaggggttatccaaaaagcggattacacaggacttatacgcggtagttacgtggtgcgacaccgcgttaccggggaattttgtaccgtggaactcggggcacgttacaatcagagagagtgggatattgtagggcctatatcactgctgggagatttactagtatgcttaaaccgtcagacatcaactacctagacgacgaggtaatcaaggcgtacgctgcatctgcaggtactttccgtaaacgattcgcactggacagcagccagctgattgtgcatctggctatcaacaaggctcggagggctaagtggaaatgaattgggatatttggtttacctacaaagacggcaaactctactggaagcacgaggttagaagtgggcgcggacgcagccacctaaactgcgccgcaggttccgaggcaggaactctgaacaaagtacatggatactggtacgttaagctgcataataagctatacaaaagaagtttgatagtatatgagatgcacaacggtccgctgcgagcaggccaccatatagaccacataaatcataacaggttagaagataccccagataacttgagggcagtgcttcctgagaagaacatgcagaacaagtccctgtatagaagcaaccgcagcggctatgtaggggtgcacaggaagagaggtcgttggatagcaaccctaggaaataaacaattaggttcatttagcagtatagagcaagccgtagagtgtcgtagactggcagctgaggcggcggggtatcaccataatcacggggttgcagtatgactagcagtattatgactatagaccttgaggtcgagaataatccttactatggtagcaaggctagcccctactgccctgacaactatgtagtgcattcggcctaccgcatagaccggaccgaggatgacggcacagttaccgtagaaccgacctttgatatcagattcaacagcaagcaggaattccttgacgacgtagccggggagcatctgtggttccgcataccttctgattgctggtgcatcgtggcccacaacgcagccttcgaaattagctggtttttaacatatcagcggcaacactttgaggaattcctaaagcgcggcggccgcgtattcgacacaatgcacggggagtatattgtgtctgactttcagagtatgtacccatccttggatgaaactgcgccaaagtatggtggggagcataagattgatggggtaaaaatattgtgggaacagggtgttctgacctcgcagatagaccccattcttctcagggattacctagtcaatggtgatataaagaacacggccctgtgcttctacggccagtgtgctacgttcacccagcgcaatcagatgcagtacgtgtgggagcgtatggatgccttgctggcttgggcgtactgcgaatggttcggcctgttcgttaatatgccaattgcgcgcaagaaccaggaggagcaggagcagcgcatctgtgagattaagcaggagctgcagcagtatatcccgaaggacctaccggagactctggatttcaacttcggctcggactttcatatgtctgcactggtgtacggcgggcctatcaagtatcgcaagaaggtgccctatgaccctccccagtacgtcaaggccgactactggcaagtcggggacacttgggttgccgtggatgacgtgcccgcaccgccaggtgcaaccacgtacaagtccggtaagaacaaggggctaccaaaagtattccgccttgatacagaggaggagaaacttaagtgggaggatgacctttacttctgcccgggcctagtgaacatccaggagctgccggaagttatccgggagaagtatgcggagcgtggagagttccgacaggcgcgcaccctgcaggacggtacgccagtatacagcaccagcacagacgcaatggaggcgctggcccgccaagggttcgagttctgtaagttggtgaatgagctggcggcgcttgagaaggacaccggtacctactatttacgggaagttctggatgcaaacggagaagtcaaagagcggaagggaatgctgcagtacgtaatacccgaacgcccagatggttccggtatcatacaccaccggctgaatacttgtgccactgtaaccgggcgccttagtagttctaacccgaacctgcagaacctaccccgcccggatgaggacggggatggggtggctaaatccaaggtgaagcaggtattcaccagccgattcggtgataacggccgcatcactgaggttgactactctgcgctggaagtggttatgtcctgcgtgcatacaggggataagaaactgctgggcttgctacaggcaggtacggatatgcactgttaccgcctcgctttccgcgagggactgccgtatgaagaagtatatgagcgctgccacaacaagaagcacgagctgcatccgctttggaaggcaatgcgtacaagtattaaggctcctagctttgcagcccagtatggcgctacggctaaggggattgcgtttgctactggatgtacggtggaatttgcacaggctttcttggacaacgaggctgcgctgttcccgcaaacaattggcttccgcgctgttgttaaggaagaggtagagcgtaccggtgcggagggtcgcatgtaccgggagcaggcggacgacggcagctatcgaatctaccgcattgggacgtggaccagccctgctggtgcccgctacagcttccgtcagaaagagcagtggaaggaggttgtgcctgggcagcgtaagcagaaggtcatggactacaaggaaaccgagatggcgaactactggtgccaaggggaagcattcttcctgatggcggtggcggctggtatggttctgcgtgcactcttggcccgtgactggttcgacaatcaggtgtgcctgattacgaacgtacacgatgcattgtatctggacagcgccaacccggaggttggacgtgaggcgagcctgctggttaagcagtgcatggaggatgcacctaagcgtatccaccagctctggcctaactacggtatcattggcgaggtgcccttcccggcggaagctgaaatgggtacgagcatgtacagtaaggagaaggtagaatgaatattaaacctggcagtattgtggagatgctggaacttgggccggagcctatcgacccacgacatcgtgcctactttgcaccgggtacgcagcatcgcgtgatatcttacgacgttgaattcggcgaggtggagctactcaatccggacagcaactcagagaagcctggggacggcatcaccttcttcgctggagagtacaagctcatcgcggagtagtgataggtggacccttgggtggtgtagggggttagggtagcatggaaatatgctagggtcaactaaataattaaataaaattatttgttgactctggcttgattctgtgattccccgagaattaatgtgatacgagtaggaacaacacaagagaggcaaccttggctaaagtaagtctaatcaaactgtggaccaaagaagagcaccaacaaattcttggcagtttcctaaataacactgatgcagctattgcgtacaataacaaatttcgcaggggggacgtaatcgtgtctcgccagcttgtacgctactggcgcagcatcttcatggataacaagggcagcaaggccagtgccaaccgcgggctgcaggaggcgcgtaagctaatccaaccaagcccaacggacgatatcgggaatacaaaggtgccggatatgtgccaccgcattctggttgtcggggacctgcacgctccgtatacccacgtagacgcaatgccgttccttgagagcgtacgtgatgcgtactgcccggacatggtagtgcaggtgggtgacgaaaccgacgggcacgctatcagcttccacgactctgaccctaacctggatagcgcaggggtggagctggagaaagccaagctcgtactggaggagctgcatgaactattcccgaacctgctggtttgcgattccaatcacggctcactcgtatatcgccgcgctaaagctcacggtttgccagtgcaatttatcaagaagtaccgggacatcttattccctgagcatggtgctccggcgtggtcgtgggccgacgcttgggtgctcaacacaccgctggggcctgtccgtttccagcatcaagtcagcggtgatttcatgctcaatgcatcccatgagcgcacctctctggtgttggggcatgagcatggacgcttcgaggttcagtatgctgcttcttcaacggcgctgtactttggtgcgtatgcagggtgcttgattgaccgcaagagcatggcctttgcttatggcagactcacccgcaagaaaccaatcctgggtgtgatggtaatcaccgagggttgcccgcagttaattccgatgctgctcgacgacgatggtcgttgggtagggagaagcaaatgaatgtactggattcaactgtcacccgagtagatgctcctgtatgggatgagcaataccaggtgtatcgtgtaaccctggagtatgactgctgggggcacaaatctgagacagagcggtggtataaagatgaagcctcagctcttagtttaaaagttggtgacataatcaaaacctaattaggagtgtcgatgaaaatgggaatctgttctgtactgggccttatctttgtaaccctgaaactgactggcgttatcgcctggtcctggtggtgggtactgcttccgttctacggcggtgtagctttgctgttggcaatcctggcggcaggcggtgtggcagcagccgcggctgcaggcattaaatccgcacttaagaatcgctaggccggacctgcatctgcacgtaaatatcatttaaactaaacgaggacgtaattatatgactacgaatgtactggcatccctgaacgctctggtagacgcagcaatcgaaacccaagatgtggatatgcgggaaaccgcacagggtggtgcgtacgaggacgtgctgctgccgaagggtgaatattacggttacttcaccgagtatgtggaaatcggtaagcgcctgccgaccaagggtggtaagcctaccggtaagcctgcagtggctaacgtacgtatcggcattgtagtgttcggccccaacggcgaagtgaagcgtatccgcccgtacccgatggctatcagtaactttgagcgagcaggcttcaagaagttcttcgacaagctcaactacgacaatagcattaagcatgcagcgcagcgtctgggccaggccttcaccttcccgattgatgagcacaccagcgccgcgggtaagaagtcgaacatcgtggacctgtccggtatccgcccgattcctaagttcgacccgaacaccggtgaacctattaagatgccagcgctggatgcctccgagattaagctgttcctgtggaacaacccaaccaaagagacctgggacagcctacacatcgaaggcaccttcgacgacggtaagagcaagaactggattcaggaggatatgtacaaggccgtagacttcccgggcagtgctctggatattatgctgaacgctggctctgttccgagtccggcagctatgcaggcacctgctgctccttctgcaccggcggctcccgctgcgccggcagccccagctgctccagtggctcctgcggctcctgtagcgcctgtagctccagcagcgcccgctgcacctcaagcctaataaaccctaatcgaaactaatacggcccctcctggggccttagaggaagcctatgaacatcatcaacatccttatcaaactcctgagtgcagcctacacagcagaagctaaacgagcagatgccaaagcgcagtttaacgagcagctgtcagttaaattcgcagacgacgcagtacgtctggccgctcaatccgaggcgcgagtagaggcctccaagcacagcaaagaggtagcagaagcgcatgcttgtcatgctgataacctgcgtgccaagcgtgacgaagtagctaacttcctgggggtataaatgcgcataatcacatgggccaaagaacagtacgctgtgtttctgcttctgcgcgcacagcgtttgcagaagcgagcagacgactggcgctgggcagctaactctcacgcatacagggcaagccttctgggtcccgagattagtgcgcagcgttatcacttgaatcgccagtgcgccaagtcccggcgccgtgcatatgccctgggcgcagaggccacggccactgagaccaaagcctacgccttcattcaaaaacacaaactgaaaggatttgactaatggataaagtattagaagcgtacgagaaccttgccattacggtcggctcagcggtatacgatgcagcggcgtatggggtgcttaatattagtctggacgacatctacaacgcactagatgagctggcggccctgtacggaatggacctggacctggccgctacagccttccgggagcacaacgatctggcggcacatgccgataagttacgaggagacgaccttgtacttatccgcgtagtgggcacgctcagcgttggcctggcggagattggctcctgtatctacgacgtagaccagagcctgcgtactccggaagtaatcggggacatgctcggcaccgtgctggtgctgtctgaactggaggcttaagtatgttgtacgtatctcgcgcaatttacgtagctttgattctcccgctgattccattggcgggactgtgctaccttggcgataagctgagcaaggcaaagtgggcagaacgttgggttaactgggccgacaagaaggcccgcgatattacggggcgctgatgattatcaacggggttgacttgtcccagcttagcgagcagttagctccgcagaactctgggaagattctgctgtacgatgcggatttttgcgtgtacaaagccgccgctacagtaaaacgtttggataccgcaatacgccgcttctatcagctggtgcttgaggatatgttcctggtcggctgctcagaggcagtggcgtacctgacgcctgcaggatgtgctaagtgcttgcgctggcacctgcctacggctaagccctatcaggggcagcgcgctaatcgacaggagctaccgctcaaggcaccgttgaagcggcacctgattgagaacccagaccagtattctgagcagggtattcaggtagtcagcagtgactacttcgaggccgacgacctctttgtaatggattcgtacagcttcggagaccggggaatcctgatgtcccaggacaaggattcttggctcagccctatggctcggttcgatataccgacaggtacagtgtggcctgcactggaggacccattcggatggattaagtgggatgacacccaggctatgcctgtacgagcacacgggttgaagttcttctggtggcagatgctagcaggggacgacgcagataacgtcaaaggcatcacgttgcttgatgggaagccctgtggcaagcgaacggcctttgatgctatctaccctattacctcagagcaggacgccgcagaattcgtcgtagcggcttacgctcgaaacaaccaagacgtactcgcagaggcagaatgcctgttcctgcggcgctccccgtcagattctgcctatcagtatctgatgtcactgttgactactcccagtctgcgtgactgggtgcattcgctgcacgagtaccataaacagcatatacagtggatacaggagcacccagacaatggcgaagatgtctgcgaaggaaatgagcctgcgggcgattgagttatactacgatgggaaacacgatgaacttgaaactattctggatgcgctgcgtgaacgagcacccaaaacacatcgaagaacggttgagcacttggattctctcattcacgacaatgctatgctggatgtagttggggggattgaggtatggtaatgagtacaccttgtatagaccatgggagaaaggggcggccaaagactgggttcctatccgcgtgggtgcttattgacggtaaacgccaacctacaaccgcacacaggaaggcgtactatgaacacacaggagagtggcccgaagtagtacagcacacctgtggaaattctcgctgcattaaccctgagcacctgcatggagggacccacaaaagcaaatcagcaaagggttccagcagcggccgctcacgtttgaacgaaggtacggtgcgctatctgcggcaaatgcacattcctggggaccgggaatggggtagcaacgctatagctagacgcctgggtatggctcaaagtacggtatatcgtatgttaagagggatttcatggcgctgcgtaaaataactcgagcacagattcgctctgtggctattaagcttgccaaagaccagggaggtatatgcctcctctgcggcaaacctttggacttcacaatcaagggggtaactggtgattctgttgtcgttgaccactgtcatattactgggcgtattcggggtgctcttcatcgctcgtgcaatggaggggaaggcaaagtggcatctgccgctgggcgctggattgttggtagcatgcaatcttctggggctattgctgaatctctacgtagggtcgccgattacttagaccgagaacctacggatatgctatactatacgcacaagacgccggaagaactagcacaagcacagaagctcaaggcccgcaaggccagggcacgacgcaaagcacgggagactgttaaatgattgaatccactaaattctatgcaggtgatttggttgtgcgcaaagcgagtcacgtagggggtatctggaaggacatctgtgaacagctacaggtagacctagactcccccagattagtgacgtgcgcagaagacggacttataaccttagccgagtgtgggacctcttggcgagcggggttcttccagctcttccattcgaagagcgaggctgtttctgactcagtgaactctcctcggcactaccagttcttcccggacctggaggcaatagaggtaattgcacgcagcatgacgcaagagcagttctacggctattgtctcggtaacagattaaaatacagactctgcgccggtaacaaggatacactggagcaggacattgctaagtccgataagtacccagaactgtatgagcaacaccgaggtaagtgcattgacgcttagtgcatggtgtcatgagatgtggcagagggtagtagagcggcgcgacaaaaagcacggggaggggctattaaatgaagacagtaatctttgatttggacggtacactagctgatggcgcgcaccgcttgcacttgctgcctactgtggatttgtatctgactgacagttggaatgagttcaaccgggcctcgaagtatgatagccctatccacagcactattgaagtgtgcaacatcatggtgcgggcagggttgcgggttattatcttgacggggcgctcggatatagtaagagcggaaacagaggcctggcttgagcggaacttcgttatgtactccgagctggttatgaggccgcacagcgacaaccgaaaggatactgtcatcaaagaggaatttctgcgtaaccaagtcgggctggaaaacattgtggcggcttgggacgacagccccgcggtgattgagcatttccgcggactgggtattaccacttacgctgtatgcgactatggtgcagcaacacatcgaacagacttaaaatcccacggggtggaggaattagcatgagtgcagtaggtacaggcatgaagtatgacgcaggcaaacctcgaatggacttgctactggacgggtgcccgaatgcgttgctgcgtatcagtgatgtgctgaccttcggggcccagaagtatgcggcacacagttggcacacggtagccgaaggtaagtcccgatacaaggccgcgctactgcggcacctcacagcacacgctctaggggaaacactggactcggagagtgggttgccgcacctggcgcacgccgcttgttgtgcgttatttattctagaactggagcagatggatagtgcggccgagtgagtggtgccacatgatgtggcagaaagcagtagagcgaggcgacgaacgcggcgctaaaaactacctggagatgtataatctctgggtaagtcgaaatcagtagttagaagtaccggacataaccaaggagactaagcgcctatgattagcgccctgaatacggttgtagtaccagaggaagcactggtgaaacgccagctggagcttgaagagacctataagattcgcggaatcgagcgcgcgcgtaagctgattacggacgcgttgcagaacggtgggattatgaacctgccgatgacgcagcgtatgctcacctcggcatacgaggtggctgctaccgctatcgacgagatgcgaaatgtcaaagccccgggcatcggtggtaagtaccgccggttcctgcgcttagtacccttggatgtcctgaccaccctgagcctgtgcacaatgtttgaggcgttcagtgtcgccccaggcgagtccgctagtcgccgccagactgcacaggcggtaatgtctgcgctgggccggaacgtgcagtcagagctactggctctgcagttacgcaacgtagccccagcgtacatggaccgcgtgtatgagtacctcacagagcgccgtacgaagtcccctacgcacatcctgcgtacgctccgtgccagtgccgagaacgtacactacgggcacgagccttggaccaatgcccagaacatctccgtagggcgtctgctgtgtgccgcagtgtttgagacgggactgttccagtggaagaactgtagcgggaatctgagcatgctctatccggctgatgacgttatggaggccttccagaaactggtagagtccgctgatactgtaaccatgaagccgcctatgctgataccgccggtgcagcacactactctgtgggatggtgggtacctcacccctatcgacaatcgcggaacctaccataacgcgcacattgacagagctcgtctccgtgaagtagcggaagcatttaagtccgcggacggcatcaaaaaagcgcttaataaggcacaggaaaccccgtaccgtattaataagcgcgtactggaactggtgcaagaagcacgggccctgggtgttgggataggtatgcctcgctcagtaccggagccgaaaccggagtggtatctggacggggttccgaaagagaattacactgaggaagagcttgaccgcttcggtgagtggaagacgcgtatgtctctatggtatagcgccgaccgtaagcgtgtatcgcaactgcgcagccttctgactacgttggaaatggctgaggaattcaaagatgagaaagccctgtacttcccgacttgtgcggactggcgctaccgcctgtacttcaagtcctctctgcatccccagggttctgatttgcagaaagccctccttgaatttggtaggggcaagccgctgggggagcgtggcctgttctggctcaaggtgcatatcgccaattgctttggttatgacaaaaccctattcgaagaccgtgcagattgggttgatgcaaatattggtcaaatacgagagttggtacacaatccatttagttcggatgcttttaggtcggccgactcgccgtggtgcttgttggcagcggctacagaccttgttgctgcacttgattctgcgtgcccagaagagtatattagccgaatcccagtggctatggacgctacgaactcaggtgggcagcacctctcagcgctcctgagagaccctgtgggcggtcgtctgacgaacctgtactgggagggtaatgacaagaaagcggacctgtatatggatgtgaagcgccgtacggacgagaaggtgatactggacctggacaaggaggatttcgttatccagagcacttactggagagagaacgaaatcacccgcagcatgaccaagcgccccagtatgacctacttctacagcgccacggtgcgcagctgcagtgactacatctttgaaggcgcttgcgctgaggggtatgaaggtaccgacactaacagtctatggaatctgtcgtgctacctggctccgcgtatgcgcgccgctatcgaggaggcaaaccctgctgctgcggcagttatgtcgtacttgcagaacctagctagacgtgtaccggcaagccagcacctgcagtggtatacgccgctgggtgggcttgtaatgaaccgctacacacagcgtgaagaagtgcgtgtacgtattgactgtatgaatctcactgtcatgcgagtgcataatcgagattttaagacatgcaacaagcgtaaggcggcctccgggattgccccaaactttgtgcatagcctggatagtacgcacttgatgatggtgctctgcgctgcggaggggttggatattgtacctattcacgactcgctggctactcacgcagccgacgttgatgctatgcaccgacacatccgtgaacagtttgtgcgtctctacgaagagaatgacctgcttggggatattactcgcgcagcagcagcagccggggcggacttgacggacctggatatgcccgaggtgggtactctggacatccggcaagtactggaatcgcctttcttcttctgctgataaatgaagttaccggagtaggaatgaagttaaaacacactagtaaaacttccgattacactctcaaggttctgtataagtctgacgacattacagacgcagtgaggcaactgcacgaactgggccacggcattagtcggggcctagctccagagcagcactactggagagtactgggcagcatactgggtaaacagtatatactaggagtctatgactcccaaggcgacttagtcggtgctgtcagctactacccagaagctgtagaggactgtcattacgtagagcctgtgctgtatacagacttcttcgtattgaagccaggtaacagtaaggcggtacttgtgattatgcagggccttcgcgcaatagctaagagtatgcgggctgggcgtatcgccattagccgaggtgcatcggataacacatacaatacaacttatcatttagtgaggtcagaatgagtggtggtttaggtaaactgttaggcaaggccacggatatgctcggccttacggacaacgcaggattagaggcgcagcagcgcttggcagagcagcaggctagcgcagcgaaacaacaggctgccctagaggctaatagcgccgcagataacattgcggagattgaccccgcaggggctgcctctgcatctgcagatgcaattacgtctgagcagaagaaacgacgacaagcagggcagagcaatcctctgggcctgtaagggggtagcttggaacaaaaagcaacattagcagaactctttaagaaggaccaggacgcaggcgtcttggatgcctctgagaagttcgcgcagtggacactcagcactatctttacccgggacgattccctggacggtagacgcaggcctctggagcgtgactaccagagcaccggcgcgcagctggtcaacactgcagccactaagattgtagggtcactgttcccgcaaggcactagtttcttccggttctccaagagttcggacctggacgagttcattagttcgctgggtagtgcagctacagcagaatctaagctggctgaggtcgagaacacggcgtcacagaaagtatttgagaaagacggttatgctgcgaagttgcaagctgtgaagctgctgctggttacaggtaacgcgttggagtatattgatgagcggacaggtaaatccatcgtctactcagtccgtaactttaccgttcgaagggatggcagtgggaacgtcctgcgactcattatcagagagcgcgcaagcatccaggacctgccagaagatttccgcggcaccttctaccgtgacaaagacccatacggcgacgttgatatctacactgccgcttgtcgcaaggttaagcggacagaggaaggcgtagaggtagtaagctacgaggtgtaccaagaagcagacggacaccgtattggggacagcagcacctatccggagctggaacttccatacaacgtgctggtgtggaaccttgttagcggcgagcactacggacgcggcttggtagaggactacgccggggactttgctcggttgtcggtactatcggaagcattaactaactacgaggttgagtctgcgcggttaatcccgctggttgacgcaagttccggtctggatgtagatgagttcgcaacgtcggagacgggcgaggctgtgcaggtgggcggcggtggttccaacgggaacagcaaatcccccgtcactgcttacgagggcggctctgcccagaagattcagtggattgccagcaacatccagatgctcgaacagaaactatcgcgtgcgtttatgtacactggtaactccaggcagggtgagcgtgtcacggcttacgagattcgccagaatgccaaagaggcggaagccgctatgggtggtgggttcagtatcctgagcgacacctggctgcgtaagctggcgtacttgtacactgcgctggcgtaccctcgctttaagctgtacctcagcgaaggcgtagtgagcatcaacgttactgttggcacctctgcactagctaaagccgcggcagcggacaagctgttagaggcggcgcagtccatgcagctggctatccctgtgctggagcagattactccacgcttcaacaaggatgcgtgcgtagactggtacttcgacgcctatggtatcgtcagcgagccgttcatgtacaccgaagagcagctgcagcagaagcaacaggttcaggatgcgtctgccgatacgtccgcaggtctagcacaggaccaactccagggcttgacagcagcagacccgacagtagcaggtaagcagctgggcttattaccaagttaacaaccgaggcatagatggataacgtagaaaacggtcagaacgtagaaactacacaggtagagaaccaaggtggccctaagattccgggcctaggtgctccccttaacgcccctaacaatcaaggcgtgcaggatgcacagacccctacccagcagcaacagggcaaagattcccctgaccctgctaagattcctctggatatcgaagccctaaaagcggccctggataagggtggcgatagcgctaaagagcagccccaggagctggctaagacaggcaacccgacgattgacgccggtgtagctatgttgcagaaagtctctgggttaactgactctgatatggtgcgggcacttggcaaggccctggagtatcaggaccctaacctaatcgatacgaccttcattaaggaacgtttcggagagcacgctgcttatgcagagttgctggctaaagcgtacctggaagaccaggttggtcaagccaccaaagcagtacaggaagcttacgatatcgtgggcggtaaggagaactgggaggtagcagcgcagctgtttaattccaaggcccctgaacctcttcgtaacgcggctcgtgtactcgctaactcgggtgagctcaagcaggccgctgagttggtagcaagcttctgccgggatatgggtcttatcaagacacagaacccaatggtacggggcgtggccagcaacaatgcactgtctgctgcagaattccgcgcagaatataccaaactccgtcaggaagcgggcaaccgtagcttggcgtccccacagttcagtcaacgttataacgatttgctcgcacgccgtgaagctggtaagcgcgtaggtctttaattttatttataaaggaaactaaagcatggccaacactatttataatggcaacctgactcgtccgcactggggcggagcggcgtctgacgtagatattcaccttgaagtgtatcagaacgaagtggatacccgcttccagtaccaggctctgttcctgggcctctccagccagcgctctatcagtggctctaacacctaccgtatcgaccgcctgaatacctcctcggtgaaaggtcgtcgctccggtgaggcgctggatagcactccggtccgtaacgataagatgattatcgtggtggatacggtgctgtatatccgtaacccgattgactaccaggatgactggaccggtccggacttcctgaccgagatgggtcagaacaacggctctgagttcgcagagaccttcgaccaggcgcacctgattcagctcatcaagggccgctcctgggttgctccggcgcacctgaaaccggcgttcaacgacggtatcgaggtaggcgcagctattctggttccgggtgccaccccttccacgcagctgacccaggctgagatggaggcgaacgccatgaacattaacctggcccacaaggctggtattgatgaactcatcaagcgcaaaaccccgctggcggatatgattaccctggtggatgtcgatacctattcgcgtctgctggagcatccgaagctcctgaacctggactttggtgcatccaacaacgacggttacaaagaccgccgtgtagtgaagatgaacggagtgcctgtagtagagtgcacggagttcccgaccgctgctggtacgcacccgctgggctctgcttacaccgtcacctctgacgacgcgctgtgccgtatggtgactttcagcaagtccaagaccctggtgactgttgaagctaagccgttcacctcccgtatctgggacgatacgcgcgagttcagcaacgtactggactgctacgcgatgtacaacatcggcctgcgtcgtccggacaccgctgcagtgaccaagttcaccttcaccaccaagtcctaattggaggttcaatggcagtaattgctacgttcggtctggagaccctccaggctaatgcagctcagcgggaggcggttaaggccgccaccgatgtagcgaagaacatccaggtggcttcggttgaatctggccgcaaggctaccaagaaaacccgtaaggcggctgacgtagccgctgatactacggaagagtaatacgcgcccctggtgccttcgggtgccaggggctttttttttgtccctgtcttaagggtccaaggggtctttaatggaggaacaaatatgagagaattagatgctgtgaacctgacgctggaagccttgggggaatctcgcgttatggacatcaacaccagtaacccgagtgcggggttagctcgctctgcgcttgcacgcaatcgtcgcgggttactcagcacggggttctggtttaacgtggtcgagcgcgaagttacccccaccactgacggcctgattaaggtgccgtggaaccagctggccgtgtacgatgcctgctcagactccaagtacggggtacgtgacgggaacctgtacgacctggtagagcagaaccaatacttcgatacgcctgtacgtattcgcgtggtcctggatttagcctttgaggacctaccggagcacgccgctatgtgggtggctaactacaccactgcacaggtatacttaaacgacctgggtggcgacagcaactacgctaattacgcacaggaagctgagcggtacaagagcatggtgctgcgcgagcatctgcgcaatcagaagttcagcaccagcaagacccgctttgcacgcagaatccgccgcgctcgttttatggtttaaggagaggttatggcgcaatcattagaaggtaccattcagagcctactgcagggcgtctcccagcaggttccaagagagcgccagcccgggcaactgggggcgcagctgaatatgctcagcgacccggtttccggtatccgccgtagaccgccgggtgagattgtctgggaaagcacgatagataaccctgggcttgactccctgttcactgaatacgtagagcgtgggactgacggtaggcacctgctgattaacaccagcaacggtaactggtggttgctggctaagaatggaaagaccatccttaattccggcaatgacccgtactttgttaccaccgtaggccagacctctttgcagaccgcaagtattgctggattgacttatatcctgaatactgagatggctccgaacacaaccgtggacaatactgggcgcatcgaccccagtaccaccgggttcttctacgttaaatccgcagcattccagaaacgctggaacgtcaccgttacctctgcaggggtagactactcaggggactacaccgccccagctgctggtagtaccagcggtaacgctgaggaggtatctggtgcttacgttgctcagcaactgcgtgactctcttgtagcgaatgggttgccagctgggaacgtgagcgtacgtggcgcgtacctgttcttctatgggttaagcaactgtgtggtatcctctgacgcgggtgatacttacgctgtggtgtccaaccagtctcgtgtagaccaggagcaggacctgcctgcacagctcccagcgcaagctgacggagcaatgtgtcgtgtgggtaccgcctcgtctgagacagcatggtaccagttcagctacagcacccgcacctggtctgaggtgggggcgtatggtagcatcactaagattacgaacatgcctagagagctcgccgcggatgacaacatcatcgcgcgggattgggagggacgtttagctggcaacgacgacaacaacagcgacccggggttcgtagagaacggctacatcaccggaattgcagctttccagggccgcctggttctgcttagcggcagctctgtggatatgtcagcctctggtctgtatcagcgcttctaccgctctactgtgacgtcactgctggatacggaccgtatcagcattagctctgcgtctgcccaggattctgtgtaccgcaccgctgtgcagttcaaccgggacttggtcctgtttgctaacagcatgcaggccgttgtaccgggctctgcagtgcttacgcccaccaacgcaagcattagcattaccagcacctatgattgtgacagccgtgttaccccggtaatggcgggtcagacagtaatctacccgaacaagcgcaacgacagctacgcgggtatattggagctaatcccgtcgccgtacaccgctgcgcagtacactacgcaggatgccacggtgcacctacctcggtatatcccaggcagggtattgcagatgcaaaactccagtgtcaccaatatggccttctcgcgcatgtctggagagcgtaatagcctgctggtctacgagttcatgtggggcggaagtgacggcgctaagatgcaggcagcgtggcataagtggtcgttcccgtacccaatcctgagcgtacaggcgctggaggacgaggtgttcttgtacatgcaagggcccagtcccagcaacaagctcctgattgtgtctatggacccgcgtgaaggttatcagttgggttcagagtaccgcgaagcctactcggatttgcagaagcaagttcaagtacagggaggggtgttcactgttccggcggtattgcgcccggttgggtgggcggacaactacaaggaagagcttatcctaacgtacttacccggcaaccctatggggcctactgaggtcggcatcaaggagattgccggggagaacaccctacgggttgtgcgcggcgtacctgatggcacttatgtaatcgggagacgttaccgtagtactttcacgctaactacgcctattctacgggaccagaatgacaagctcgttggaagtgggcatgtgcgcctgctgcgtctggatgtagcggtgcgtaactctgggcacttcgatgtacaggtactagacaccccgcgggacgtcaattggggcggggaactgactggtatcctgatgaactcaaaggagctgacgcttgggcaggctctgcgtatggacctggctacgattaccgtgccatgtcgtaccaacgcagacacaaccgaggtgtcactatttactgacggttctatggaactgaacgtgttggatatatcgtacatcctgcgctacaaccaacgcagacggaggatttaatatgtggtggatggttgcggccatggccgctaagaccgttctggggcagggtgctcagattgaagtgtccaaggccaggaacaaggctgtgattcaacagacagccaaacagctaaacgacatcgcgctacagcgcgcccagtccagggaccggactgaggtgtctctgtttaacattcagcagcagaagctgcaggcacagagccaagtaggactacaggctgcagcctctgggactatgggggcctcggttaaagacgctgtagccacagtgaacactgtagccgggcggcaagaggccagtgtgcgcgaccagcaggcaactcaggaagagggcttccgtctaatgacagataaggctgtggatagcggcctggctaacatggatatggaggacccgtacgataatatgtttaactcgctgttgagtgtcggggcatccgctgttgggcagtacgccggtaacgctgcgtcatcttctgactctggcagctcttcgcctggtagcggagcgtcagctacgcagagcatggcatcctcctatgacttatgggggagtaagggcaatagcccagttcacacctggtaaattaggaggaatactaaatgcctgtgattcaacccggtagacaggggttaaatatcggaggagtgcaactgcagtccaacgatgttagcttaccgtcaacggtaagtgaagtatctgttgatacctccaaagcaaaacgcctagccgccctgtcagggttcgtgcaggacttcggcgtaggtttcgacgaggcagtaaaagaaaacgccgcagccgccaccgtgcgcggcgctatggatgctcagggcgcagtagatgcaatggcctccaaggacgaggctgtacagaagcaaaacatcttcgtgcgcgaagcctaccaggacggctacgtatccgccgcagcgtacgacactctagccaagtggcgcacagacagcatcgcccgggctaagaaagctgccgaggcagggctgactgacgaggaattccagcagcaggagcaagagcacgtacagtcaatgtcagacaagctcgggatgtatctcccggatatgtccaagcagtctgctacgagtatactgcagcagctccgcgctaccagtatggctaactatacagccttccagaaaggacgtgctgcgttcgccctggcccaggctgaccgtgccctcgaccgtgggctgagtgcgtccagtgatgagttctatcagcgcctgcaggcaggacagggtgccgctgcgcagatgtctatcaagaccggattagacagtatcctggctgctgagcacttggacaagaacaagaagctggaccgagccaagcagtatctggttagcgtagcgcagcagacgcaggacccgctggcaatcaaccagctgcaggaaatggccaccaaggaactcggcgtcaactccgtggatgtaaacgcggcgctgtatcaggagttcaagcgcgccggtgctcagattgagacccaagctcgtttcgaaatctccgatgcaatccagtctctcgaaggtcagaccccagagcagcaggaacagactatgcagcgtattcgtagtcgtgtcattgagctgtcggcatctgatgtacttagcgccgggaccagcatggagttctggaacaaggctcagaccattcgagagaaggcagcagacgcccaagcattgcgcacagcaattactgggaatatgccaagctccactctggcagggatgttcaagggtgacttagataaggcacgtacgcagttactcaagaatttcccagacactccagaagggaacttgcagctgctggcatacggaagcaacagcaaggatgcgtgggccgtcaacgaagcgcacaagcgtatgtcttcggatatggcacgtacgctgactacgctggaccagctcggtgaggacggtgaggtttcccgggagaacgtcaacagcatcaacttgtgggcacaagcttatagcaccagtacggacttagggaagatggcgctactgtctgaggttccatctgagtggcgtggagtggtgcagaaagctgttacacaaaacccaaataatgccagcaacactatcttggacgaccttcgccgccaggctaggaataaggcgagtgggcgctacagcaatattcaaagtaaccccacggacaagatggtggacccaagcggcacggctaactggttcagcttcttcggggatgcagacgcccagcgccaggaagcgcgagctgctatggaagacgagtaccgttatgtgtataaccacaatccggaatcccttgtagggaaggacgctgacgacatcaatacgatgctaaaaggcaatatccaatcccgtaagctggagctggacattgctggggcacctaggcatgtgtatctgcccgctggcacctctgtgcaatctatcatgggggattataagggtgaccaagagcaattcaaggcctccctgcagcagcatatacagaaccaggttcagtatatgtcagaccccagcaacatagagcgtgtagtagtgcaggccgccaccgcgggcaacgcaggtcagaacatgaccgtaaccgtgttcgacaagaagggcgcattccagactatgtctgtgaaccttcgagacgttcaggctactgcacaggctgcgtatgactcggcactagctggcgagatgaagattggcagcgaacaagtaggcgtacgtcccgctaccttctatgaccacgacaacggacgtgctgtcagcgtgcaagtcaacggtcgtaactcggtggggctggaaccatcactgtttagtgacattctcgccaccactatgaagttcgaagggttccgagaaggtaaaggcaagggtagtgtaggcttcggtctgcatgttaactcgggcatgcccgtcccacagaaagtgaccattgatgacggcatcagtatcctcaagtcctccatggagaagcagtacataccgaacgtgcagaagcaactcaaggggcagggtttgaatgcctccgacgaggcgttaaaggtaatggtggacctgaactatcacggtggtaacggtagctccggccctgtagcagaggcgatggcacaggtacgcaaggctgctaagtccccggtgggggcgtatcagtaccctgtatctgaggcccagggtagggcttggcaagcgctgcggaataccccggcgtacaagcaggcccaacctgagcgtaagaagtacctggaacaaaacctacgcgattggctctttgaagcaacgcactaactagaggcccttcggggcctccccttatcaaaattcttttaggagatattatggctcagtttctgaaccaagaaccgaatccacaggaaaaggattctgctaagggcgcaacacttaaacctgcgcctgagcgcgtagattggaacgatgccggggacaacggtctgaacgcactggagcgtgcctcattactggcacaggccaagacaccagctactacagccgcagagagctttgcatcgggtatgggtaacagcatcattgccgccgctatacgtaaggcctctgctccggcatttgaccgagacccgaactttaatgctaagcagaccctgagtagcgatactcgggctaaattgtatgctccgaatcaggaagagattgagtacctgcacgactctgtgtcggtagaagattacaactaccgcatgcagcagatgcttgagcagcgtgaccgtgaccgcttaatggcagacaacacagtggctgggttcgcaggtatgctggtaggtgactccccgtttatcctagccccgatgtctgctgctggtattgctggccgtgcgggcttagctgcacgtactgctatccgtgctgctgacgtagggtctgcattctatgcacaggaccaactgggccagtccgccgcggtaactgcactgatagcgggcgtagctgggttagaccagctctgggatatgtctagggctgctaaagctgccgctaaggcgcgtactgggcatgagcctatgttcgacccagaagcgcctacaacgcgtacagctagggatgctaatgttaccggagtaggagagggagaggaaatcctcactaagacactggatgaaagcatccaagtatctagaaacaataccgcctccgtgaacatgaaagcacagcacgtagttcagttcttgaagaagtctgagcacttgacagcaggacagaaggctattctggacacgttgggcgatgctgtaaatgacattgattttaaactggtagcaggctccgcaaaccgtagccgctacacttacgcacaacaagatttagctaagcgtggggagatatccctgcgcgcgcctaagcaagctaacggcagcacctggactacagtcggtgatgcgctgcgcgctatggatgcagatacaagcaaggtggccgtgcacgaactgattcatgccgctactgcgcgcgccattgacagtaatcccgagattgctaaacgcctggaggaagtgcgcgctgttattgcagctgactccactttgacaccgcgtatgcgatattacgctagtagtgtgcacgagatgctggcaggcttaggtgacagccctgagtgggttgagcacctggcacgtacgcagtctcccaccggtaagagcatgctccgccaactgggtgagtacatcatgaacgctctgggcatcaaggccaaaggctctgccttggaggatgtcctggatgcatacgaggacgccgttaagtggaccgctaaggattatgcagaccaagcccagagcttccgtagcgaagccttccaggacctggcggatagcaccaccctcaacgaggctaagcgcgcccaagctatgctagacggcgctaagaagaagctctccactatgtttgcactgtacgataatatcgcccaaggcaacgaagacttggctaaactgctagtgtcggatgcgtctgcagtaggcggccgtcgcccgtcagtggtagactacaagcgtaacctcactttggagatggatgctcgtgccagcgtagtggaagatgctatactgggcgcattgagggataagggtgtaggcgtactctcacgcttcttccatcgtagtaatttccgcgctgagcgggctgcgctggaagaccgcctgagcaagtacctggatgccgcttatagcgccgacgtaaacggtcgcgctgttccggtgccggatgcagagattgctccgttggttgatgcctaccgtcgctctggctgggctagcaagtggcacgagcatatgctcaatgccggtctagtggatgatggtgcgttggttaaatccgactactacttcccgcgccagtacagctatgacaagatgcgtcaaggtatcgcacagggtaacactctggacgactaccgagccctgttccgggccgccctgcgggacgtgtaccctagcatggagtcagaggtagtgcagcgtgttgccaaggagatggttgacggtatctacaacggccgtgcgggacagtctggccctatgtggaagcagctgattaacggcatgggtaacgatgaggtcgtcatggctatgcgcagcgctggtgtagaagagtctgcaatccagagcttcctggctggtaacgtacgagaatcaggcagcacatctcctgcgcggaacctgcgtcagcgtactcggttcaacatggacaaagagtacctgattaacggaaagagcatgcgcatgcaggacctgatggatactgatgtagccaaggttatgcacgggtacactaaccgtatgtctggacgtgtgggtatggcctatgcaggcgtacaggacctgggccagctagctaagatgattgatgagtctaagcatgcactggcggactccgctaagtgggagaagaccgtcaacgacaccatcgactttatcctgggcggagcacccgctgacgctggacagcttccggatttgctgcgtgcagccgggaacatggctaacgccaccatgctcaagaactccgggctgtatcagttgactgatactgctttggctatgaaggagttcggcatggctagggtgctgcgcagtatgcgagaccagccttggttcaaggaaggtgccgtagctatcaagaccccagatatggcttctcgtctagacaccgtgctgcgaggtaatatccagaaggagatgcgcttccgctggctgaatacgtacgctgacgataacctggacctgacccgtcaggcctcctggttcaacgtcactcagaacgttgggcaggctgcacgtcacgtcaacggcatgagtatggtgcaccggctgcaggttaacctgaactccggtatcgtggcagacgagcttacgcagatgttcaagggcgatgctgaggcgtttaagcgtctggagcgtttcgggcttacccgcgaaattgcagaccgtgctatcgctgccaacaaggctaacccgggcgccatgttccagccggacctgcagatacaagttgaggttgtagggacgcgtatgatggactacctggtacagcaggttcgtactggagagacctcacactttgcacagttcaaccctattggcaaagtcattgtagggtaccagagcttcgcactggctgccactaacaagattctgcgtagagagctgaacgatgctgggtggattggcgtagcccacattatggcgtaccagttcccgttaatgctgctggctactatggctaagcatggcatggacgggaaggacgtggacacccagaaactcatcggcgagtccgtaatgggtatgagtgccatcggcgggatatccttactgcaggatatcttcctgggagattctcctcgtcactcattagcatctatgggttacgtcacagggctgcttggagcggtgcaggacctggctaccggtaatatggatatcaagaccttcactaagcaggtcccgttaatccaggaattcgcacctacgcgagctataatcaataacttcggagacgattaatatggcattcagctggcaagagcaaatcaagccagctggtacccaggatatccagtgtgatattgagtatttggacaagtcctatattcatgtatatctcgacggcgttgaaaccactggatacacttggaccagctccactaatatcagactaaatacagccttggcagcaagcacgactgtgctgctaatccgtaagacagagcgagagtatctgtacatcgagttcgcaagcggctctccgttcatcgaggtaaacgtagattctcaaaatacccagttcttgcacctggctcaagagctggtagagggcagggctatccccggattctacggggatataagcatgaatgggtatcgcattactaacatagcggacccgacaggccctcaggatgccgcgaccaagaactatgtagatgttggtgatgctaggcttgacgcgcgcattgactcagaacactcagcctgggtatccgccgtgcagacagaggcggctatccggaaggcagtggacgacgcactgagcgcccgtacttccgctttggagaacacctttataagcggggtagagacagttagctacccgtggagcacggtgctgaccgaggatacggacgaagtgactcctggcctagcattcaccaaggctgtagtggagattaacggggttgggcagattcgcggttacagtttcgagattgtagataatacgatactctttgcagagacattacctgcaggaactattgtagccgcccgactgggggtcgacgtaactgcgggggacggattcgctacacaagcatccgtagattacttggccgactccttggggaatttggcgtatctggataaagccacggctgtatctgatgcaacaggtactggagacgtagtggctcaactaaatgcgctgctggcagcactacgcactagtggggtgctaggaacgtaacaggagaaagtatggcaggggcggctaaacgtagtcgcctctcagagctgcaccgcatgttcactgaggccttgattgaagaaatcaagcagtctaaggaagatgaggtgccgctccccgccgcagataagtcagttatcgctaagttcttgaaggacaatgacatcaccgcggatgcagattccgaggagatgcaggaccttcgcgacgagttcgatgacgaactagcggcgcgcagagaggcgcgtaagaaagagattttaaacaagattagtggttcagattctgaggacttactagaaggaattgtctaatggtatcggtgaagactgcgcgaagactgcgcatgctcaaccagaaacttactggttatagcgcgaatccgcgcagtattcccaaagaggagcgcgaggacatcgcgatgatgatggccgcggcgctgagtgacttccgggaatttgcgtacatcggtatgcggttcctgggctttacgctcacggacatgcaggccgacattgcagagtacatgcagaagggccctaggaagcgcatggtggctgcgcagcgtggtgaggctaagtctacactggcagcactctacgccgtctggaggcttatccaggaccaatcctgccgtatcctgattgtgtccggcgcggagaagcaggcgtccgatgtagctaacttaatcattcgtatgctggaaacctggccgctgctgtgctacttgaaggctgaccctactcgtggggaccgtacttcattcgaaggttacgatgttaactgcgacctgaaacctctggataagtccgccagcgtagcctgtgtaggtataaccgcatccttgcagggtaaacgtgcggacctgttgattccagacgatatcgagaccactaagaacggcttaacgcaaacccagcgtgagcagctgctgatgatttctaaagacttcgcagctatctgtacgcacggggatacgctgtacctgggtacaccgcagaccaaggacagtatctacaaaaccctgccgggacgtggcttcgaggtccgcgtgtggccggggcgcattccgtctgttgaaatggaagagcgatatggaagtacacttgctccttatatcctggagcttattgagcgcggctataaacgcaccggcttcggcgtcgacgggacgctaggcgagagcacggacaccggacgctatgacgaggatgcgctgattgagaaggagctggactttggtccggaaggcttccagctgcagtatatgctcgacaccacactgtccgaccagatgcgtacgcgcatcaagctttcggatatgctggtttactctggcagccaggattcctccccggagacgttctcctacatcgcggaccgccggtacctgtaccagcacgagcatgaggggattatgggtcagcagatgtacttcccggcattctatggggacatgcacctgccgtaccagcataaggtgctggtggtggacccggccggttgtggcggagatgaagtgtcctacgctgctggtggtgctgcgaactcgtacattcacctattctccgtaggcggcttccaaggaggtatcagcgaagagaacattgataaactgattgacctgtgcgtagagttagacatcccggatatggtggtggagagcaacatggggcacggtaccgtgtctatgcttatcctgaaccggttacgggagcggcgtctcgccggtattggtgtacgggacctgaacaactccacgcagaaagagcgtcgtatcatcgacacaatcagcccagttactcgccgccaccgcctggtagtgcatgagcgtgctattcacgatgatatcagcacttgtatggcgtacccccgggataggcgttggctgtactctgcgttcgcgcagctgtccggcatcacgtacgaccgcggtagcctggctaaagatgaccgggcagacgcaatagccatgatggtggctacgctgaacgggcatctggtggaagatgagaaagtggtggctgagcgtgagtccgagaagatggctcgggccttcattgagaacccgctggattgggcacagagcaaagtgtctaagggccttcggggtgtagctgctcggctgcagaaccgcggcagaggtaaacaacatagaggaagaagataatggcatcaatcatcgcagctaaagctgtggatgtacagtatgagattgtgggtaaggcccagaatctggagaagcaagtatctccagactacaacgtgggctttgtcggcaccgcggccctagacactctgaatacgttctttacgtatatggagggtcagggctataccgccaccgcggaaggcgctagcttcgttgctgacggcacgctacaggctcgtctattcagtatgctgtcgcagctgagcaagaccggctacgttgcgctgactggcactggtatgccattgggtgagggttcaggtaccgactttgatacctcattcaccgccctgcaatctgcatttgaggctgctacagtagcggcagaagctgaataataaaccaaaggagagtacacatggcaattgcaaaagcaaccccagcgcaacagcaggagctgctgcgccagctgaacattctcggtaaggacctatatgctatccttacgcagccgcagaacgtggcccagaccggtgctgccttcgataccaagattgctgcacttgaagccgcggtagccgcagtgaaggcggcaagctaatgcgtaaactggtcgctgggttactgctcgcggttactttgactggttgctcggcgacctctgcactcaccggcttagttggttctaagccggatgtatctgctcaggttggtgccgaaaacaccaagcaaaccgttggcctgaacaacaaggtggactccagcaccaccaacaaaaccgatgtatcagattctaacgtaggcactttggatacgtccagcaagaagcaggtgcaaactattagcacggggacaatccaggcagaacgcttacaggtagttaacaatgatagttacagtcttatcctcgccggattagctggggccagcattcctctggtcttcctagtggtcattctggtgattcgtaagctattcaggaagaaggggcagcaggatgattaaggtaggggacatggttgggccggacctcgctacccgggcaggcgcagcagttactggcgctacggtatcaggaggttggttggcagagttaatgagctggaactggagcactatcagcttcatcactgcgacggtgtgcgcggtgctaaccctggcgtggaatgcgtattacaagcggcgtacattcaagctcctagaggagcaggcacgtaaggggactattaaatatgagtttaaggactaaggttattgcggccctcacgggggccactatgctcggaggcgccattaccggcgtagtgcagcacaacgagggtctgagccttaccacctacaaggatagcgcaggtgtccccactatatgctatggcgagacaaagggcgttaaaatgggccagagagccacgctgagcgattgtcagaagcagctaatacaatcagcaggggaacacgcaaaggctcttgacgggcttcctatgcagctctctgacgtagccctggttgggtctgtagacttcatttataatgtaggcgtagctggcttcaacggtagcgccgtgaagcggcatctcaagagcctggattatgcagcagcagggaaggccgtactggactggcgctatattagcaaataccagcagaaatcccccggcaccggttgggtgtacaagggcagcaaccgctggaccttcgactgctcccagtatattaatgggcagcgcaataaagtgtgctggggcctatgggagcgcaggcagtggcagagcaaagccattgggaaccagtacaagaatgtaagcacagccctggctgaattgaaacgataagaggggacacatggcactagtagagaacgtacaaacacggtactacagccaagacgatttgtggtgcagagtagctgactacttagcgaaggatgccccggtacttaccggactccgtccggattcttctggtaactatgcagccgctattgagcggatttccgctaaaggtgtaaaggtgctgcgagtacctgtggggtcttattatgttggagactgccaccttactaaccctatgctgtttataggtgatggcctagagggcgttaacccgcttggggctgtattcgttaaaccgagcacagccagtaagatgttctactttgacggtacgagcacccgtggaatgggcggcgggttccttagaatgcgactgcagggggctgtcagcagtgattcgggacttatggtggaggtaacgtcctggagctattttggggcggaaaactctgcttttaataacttggcgggctctgcgctggtgttgcgtgactgtatggagagtcacatctccggaaacttattccgtaggatgggtgcctctaacggcagcgttatactcctcggggattacataggtattcctaataataacgtcaataacctgcacattcagaataacacattcgggttgtgctctggtgcgtggattaagagtacagcaaacagtaacccggacctggtgtggattacggataataagtttgagtgggatagtgtaccgtacggagctaacacaaccacgcagcacgtactagactttggacagctgtcacgctcttggattacccgtaacggttttgcgcacttccgcccagactccgaccataacctgtatgccgggtgtattcgtattaggtctggagctgttggtcctattgttatttctgataacaaggcgtatgggtgcgaaggagaattctggaccattgaaggtggttatgtagatgccttcgacaatgatgcgaacattgcagatgccagcagtgttctatcctggtcactgagtagtactagggcttgccgcatcaaccctcctcgcgtatacagtgggaacatgaacgtagtgcgcggggatagtccgttcggccctgggtttatcgggcaggcgtacatgcgcggggctgctgctgctagtcgtaccgttagggctggagccgctagtaccgtggcactagatgtccctgcgggccaggagatgcgtcggtaccagttgccactgcaccttctcggggctatagtgcgcgtatccttgcgagtctacaatcccggcgctactggtaacataaccttagcagtgggtagtggcggctcctctgttgctgcggtaccggctggtccagggtggttcgatgtagacttttacttgggtaacagcctaactggggacggagatttgcgcttcaccaacagcaccggaaacacactgagcctggatggtattacagtagagcgtgctcgttctgttccatttagctttgcgtggaccccaggtgctgtcgctgctggtacgctggtatctagtcctgtgcaaaccctgccgtacggcattactcaagcccctgtcggtttgagttctccggtatttaacgggtctgttgatgggctgctagccggtatcagtagctacagcgggtacagctcctacaaagttactctgtttaatcctggggctactccaattacccctggggctactcgggctagcttggtgttgcacttctaatgcacagcgtaaaacccaggcccagtctaggcgagcaggtctatacctggacctgaaatttattagactcacgcgagcccctccctcaccctcaacgcgcccaattgcccccatagggggtgcctagcgtcaatttagggggggggggcactgctagggcctgctagtgcgcaccagcgggcctcagcgggcctgtgctgcgttctagggctatcgctagtgctaccctatggctatccctgtgcgttcactagggcgcttcctgtgcgctctacggggcgctggggctatccctgtgcgctccctgtgggccataggggtgcgccatgccttgcttattttgtgcgtccattgcgggcctgcctagtgcctgcctagtgggaccagtagtgccgccgtagtgggccagctagtgcgctgtagtgctatccccggtgctatccctagtacgcactaggctatccactggctatcgctagtgctttacattgtgctgattatatgctacgctgcgcgctccccactagggcgcacttccactatccagcgctctcccaatgctatccctttgctcttactttcattcgaaagctattatgaaatgaagtaaccggagtaggaggggtttagggacactatatacactactactcactatgcactccctagtatgtccctgtgcctacgcagtaggctgacatacctacacagtcaccgcatcactacgtggcttcactctcgttacgccactgcgttctgctctttgtagtattaggtagtattggctcgtaatggctagcagtggctacagctagtgccagcatagggctatccctgatgtggttctaagtatttaccctgcttaccctttttgctcccggtgataaaaagcttaaaaaagtgcttgcttcttttggttcaatgggtctatagttcaatcaccgggaggcgctgaggtgctaaccggggccgagccgggaggctccgctggattaaagctagatagtgcgaagggttagacactcgataaaaagagttgacaccgcgaagggcataagctagattgagtccaagcagtaactgaatatgtcgtgtaacagtaaatgcgcgattggaaccctaaccacgatagggcgctgagaggctaacagcgagataacccctaagaagtgatgctcatcggagtttagggaaacaggctggttgggaactaccgaataccccgagctggacagccagcaagtagtaagaaataaacgcttgacaagttctgattcactgagtaacttagatagcaagcagtaagctggttcgcggggaggcccagtaccttgactggtacgatgacgaccgagcctagataatcagttaaaaagagtaagcgtgccggacgttatcaccggggttctgaggcaaaccatactgccgaggcgagagcagctcgctcctctgaatcgagggaacaaggcgcggagtgtaccccgcaaagagcatataacatagcgtagcagtaacaaggctgcgctagattatgtactctgagaggtgagattatgcgcaaagcaaaacgcctagcattacggcggaatatgcagttatcacttaaccctaccgataacgtgccgcttactgtgaagcccagcaaacaagggttgagcggtgagcacagggtgaggggaaagcaaaaacaaaagggcggcagtaaacagcctagtgggtggcctactgttaactcccaatttgggcactaattacagcctatagcatcctatggggtgctatgtgaagtaattatctaagcaactagggaggtgccaaatggttggctacggtgaaggttaatagcctatagcgtcctacggggcgctatgtgaaattaaccgatagtaaatcaatcaaagaggtgtattatgacccattcaactggtaaagtattcaagctcaccgctgcgggtagcattcgtaaagcgctgggcgacgtagtggaagcaaagcgtaacatcactatcagcgcgctcttccacggtcttatcagcagcaacgtttcctgggctacggatatgcagcgcagtgacgctgctgactttgatatggtgctgcgtacgctattacccatcaagttcaacaaagagtccggtaagtacgagttcaacgctaagaagtgctatgcgtcggctgagaagctgggaatcgaactggacactatgcgtcttgactacaaacaagctgacaagcagggccgcgaagttattgttgccagcttctatagctcctgtatggccctgtacgctgccgaagcggagcaggtgaagaatgacgcgctggacgctgatgcagtgcgcttgcaagcgctggggcgcgttaaaaacgccattaagaaggccaaagagactggcgtaagcgacgcagatttggtgagtatgctcattaatcagggcgtggatgtacgtgctgtgctggacgcaactttgaaggaagtggcctagtagcaagcctatagcgtcctacggggcgctatgtgaatgcaactggcgtatgaggtttcatatgaaagcaatactggtctatccgggccatgaactctggcccgtgtggtgcaatcggatatacgaagaatacagctacactgtggttatattctctgacaaagacactaatcaggaatcccctttagaatttgtggatacctacaccgaaatggctgcccgcactgtgctggacgccgtgaatcttggcattatcaacgactggagacaactttatggttaacgtgttcaacatcattgtgaccagcgctatgctggtgctgggcaacgacgtaaacaacccggtgccctattgcacagtgcagttgcagcaaccggcggcgcagcaaccgcagccgcgccctgagtatgacctctttgaagaccccgagggtggttgcaaagagctgggcgcgcgtatccttgcggcggtgcaggagcagtacccggacgccgctgtaacgctcacggtggacggtaagagcaacaacgatatttgaggtagggtatgcacggaaagaatcctgagacgctgctgatgtgtaggcagcaaccaacaatcgaaggactggcgcgagagtacagcgcgaaggcagcgctgcgccagcactacgagaagcaagcgcagcgcctgggtatgaccttgcgaggctactgctaccggtttaatgtaaggggtattgtatgagcaaacagaacctgtacgacgtatacaagcgcccgaatgggctgctgtaccgggtgccgctgcgcagcccactgcataagcgcgcggagttctatgcaaagcatttgcagcggtggataccatccgggcacaaggttggtgggttaatatctagcgaccgcagcgccatcgtagcccgcaacgtggtgttcaaggacagcgtatgctcacagtagacgaaacagcgctgctgtgctggcgtctgctggaaacgcagggcaagtgcggctgcacttgggagacattcaaagaggttcctaatgaactcaagcaaatcgtgccagttgaacgtcgactactccgagttagaaaagagggggttggcactgtgctcacaacctaccgggagtatacagagtctgccgcgcggcggttgcaagagcacattcagttcgatgtggttgcggctctacggcggtacgggtatcgtggagcttttacgcaatttcgggccgcagtccgggcttattacaagcagcaacaactcgctgcgtggtacgcacgctgacctcgttattactgacgaactcaaagaatctattcaggagcaaa

SEQ ID NO: 53 - DNA, 524752 bp, Unknown
  source: /note="Description of Unknown: MKP2_coc_1 Mutant Bacteria sequence"
agaatttgcctggcggcactagcgcggtggtcccacctgaccccatgccgaactcagaagtgaaacgccgtagcgccgatggtagtgtggggtctccccatgtgagagtagggaactgccaggcatcaaataaagcagaaagcccggtcgaaagaccgggctttttgttttatctgttgtttgtcggtgagcgctctccagagtaggacaaatccgccgggagcggatttgaacgttgcgcagcaacggcccggagggtggcgggcaggacgcccgccataaactgccaggcatcaaacaagtgaagagcccatcctgccggatgggctttttgcgtttctggcgtccggccagcgtgccggcatgcctccccggtggcgctgcgcttaccggggctacggatccgacacggggctacgtccctgtggccggacaaggtgcgcagcaccgcctccgggaaaatccctcctatatctcctttcaacgcaaaataaaaccccgtcatggcaatcccttcgccataatccactttttccctgcccctgcgctggcgatgatcgcgaaaaccgtgcttgcgaaaaaaaatgtgaatccaatcacatataaaaatataacaattatataacatttagtttactaattaatttgtctgcgtgacgtggtacgcccgacaagacagattgcagtctttgctggagcaatataacaatgacagaaagtagcattaccgaacggggcgcgccggaactggccgatacccgtcgtcgtatttgggcaattgttggcgcttcctcggggaatctggttgaatggtttgatttttacgtttactcattctgctcgctctatttcgcgcacatcttctttccatccggaaataccaccacccaactgctgcaaccggcaggcgtatttgccgccggatttctgatgcgtcctatcggtggatggctgtttggtcggatcgctgaccgccggggacgtaaaacgtccatgcttatctcggtctgcatgatgtgctttggctcactggtgattgcttgtctgccgggttatgcggtgatcggcacctgggccccggcgctgctgctgctggcgcgtctgttccaggggctgtctgttggcggagaatacggcaccagtgcgacctatatgagtgaagtcgcggtggagggtaagaaaggcttctatgcctccttccagtacgttacgctgattggtggtcaactgctggctgtattagtggttgtggcgctccagcaggtgcttagcgatgaagatctccatgcctggggatggcgtattccttttgccctcggggcggtactggctatcgtcgcgctgtggctgcgtcgccagctggacgaaacctcgaagcaagagacccgggcgctgaaagaggctggctcatttaaagggttgtggcgcaatcgccgggcctttgcgatggtgttaggctttaccgccgccggatcgctgaccttctacaccttcaccacctatatgcaaaagtatctggtcaacacggcgggcatgacggccagcaccgccagcgtgatcatgaccgcggcgctgttcgtttatatgctggttcagccgctattcggcgccttctcggataaagttggccgccggacctccatgctgtgctttggcgtgctggcgacgttatttaccgtgcctattctcagcgccttgcaaaaagtgagctcaccctatgccgccttcggcctggtgatctgcgccttactgattgtcagtttctatacctcgatcagcggcatcctgaaagcagagatgttcccggctcaggttcgcgcgcttggggtcgggttgtcctatgccgtcgcgaacgcattgttcggcggctctgcggagtacgtcgcgctgtcgcttaagtcggcagggatagagcacgcgttctactggtatgtgacggtgatggccgccattgccttccttgtctccctgatgttgcatcgcaaagggaaggggttgcgtctgtaacgcttactgatgagccaactgccatacagcgtagccggtggtcgcgccggcgacatcccaggcaaaatccttccagctccagccgctcccagccgggcggctgtcccaaagctcttttgaggcgccaaggctgacggaaaacatcaggccgatagcggcgctgcggtcccggctgtaaccctgatgttgcgcatattcattgccagcggcagagagcatcgctgaggccagaaaatgctgggctttgtcctgaccggaccatgcatcatttgccatgtggctgcagccggttaacagcagcgaagcaatcactattatcgtacgcatagcgcttccagaaaaaagccccgtcgaggcggggctgatagtcagagaatacggctgatcagccggtcaatgcggatccgccgcaggcggcggatcagttttcgcactttcaccggatagtcggcgatactttgcagatcccgataatgtttcactaccgtggtgtgggtgcggatgagcttcagctctttctcccgcatggcccccagctgccgctttggatcgtggatcagaatggcgttttccagatcgagccgccaggcgcgcgggttcaggttgttgccagtgagcagcatccactcatcgtcaacccacatgcctttcaggtggtagctgttatcgtcatccttccacaggcggacgatcagctgatcggtattgacataatactgcagccggctgaggaaacgccgcaggttgatctcatacagatagggaagggcgccgatgattttaaacggctgatcttcaggaatgtagaaatcgttagccgttttatcgccgacaataatctccacctgtttaccgtcgcgcagcagctggatgatatttcttaccagtacggcagggaggttgaagtagggggtgcagatcgtcagcttgtgttcggcacagggcatcaggtgaaagatggttttattcagcaggctcgatttacccaggcctaccagcggggtgacggagagttcttcgtcaccagcggtgccgacaaaatggtagctgcggtcgcggagctcctgacggtactggcgaatgtcgtttttgatttccgggctttttggccgatccggtctgtcgagacggttaacgccgcgcccctgaaccagattgttgtcgacccagtcgaacatgatgtccgccattttgccgttacggatgcactgatagcgatcatagcgatacttatcatgctgatgcagataaacatcattcaggctggcgccgctgtagaggacgcagtcatcaataataaagcctttgaaatggagaacgccgagcgcctcccgggtgttaatcggcacgccgtaaacggggatatctacccctggattttcattggccatccgacaataccagtcggcattggtattagaggcggcggcgccgatacggccacgctgagcgcggtgccagtccaccagaacgcggacatccagttccggacgctggcgtttggcgtcataaagggcctgcaaaattccttttccgccatcatcttgctccagatagagcgcaataatgcatatacgctgagtggcgtgggcaatccgggtcagtaacgcttccctgaattccgcaggggcgtaaaagaactctacatcatcaactgactgagaaagcttagggagttgggcaaggtgttgttgatgtttattacgcttaaattttgacaacatcacagtgcgtttcttctctgtttattgaagggtcttctgtaccatgcagacgacgtaagcgggcaataataccattactacccgctaatgtggtcaacaattgcggtcagcgtcgcgcgattatccctgattcaggggcagcgacaggctgacaatcccatcttccagctgaatatcgacggtgaatcccagctttctggcgaggcctatcatgcctcggttatttggcatcgtaataccattaaggcgctgcaggccatggctttgcgtataggcgatcagcttttccagcaaccttcgccccaggcctaacccttttaaatctgaacggaccagaacggcaaactcggcgtcaatattatcgggatcggagatcgcccgcgtcacgccgaggatctcgctcttctctgcgctggtcctgacggcaacgaacgccatttctcgatcgtagtcgatctgggtcatattggctaagtcgtcatgggtaaattcgttgatctcactaaaatagcgataatagagatcttctttggtgacctgggcgataaatgcgagcaactgtggctcatcttccgggaggatcggccggaacagacagcgatcgccatttttcatcaccacccactcctccagttggtgcggatagggacgaatagcgagacggctttcactgtcgccgctgaagggagcaagccccagggtaacgtccagcgccgtaaactcgttgccggaggcgagcaggggatgaatatccaggcgctggatctccgggcagtcgacgatcaggttcgagacctgaaccagcagctggcttaagccagcgatatccagcgggcgcaaggcgctgcggccgcggatcttcttatttttgatcgcctggatcaccagataacgcgccaggttcatattcagcggcggcagcgccacggcggcctggtcctcggcccgccactccacgccgccctcgcctagcataatcaacgggccgaagacgggatcgtgctcaaccactactcttagctcctgggcgccagcgcgattggccatgctttgcaccagcaatccatgaatgcgcgcctggggccaggccagtttgacgcgatcgatcatcgcatctgcagcctgctgcacctcggcggcggtacgcaaatagagcatgaccccctgtacttctgatttgtgcgggatatccggagaacgcagcttcagcgcaaccggatagcctatctgctcagcgatatgcaccgcttccgcgctgtcagcggcaatccaggttggcagcgtgtggatgccataggcccgaagcaccgggctgacctcgtgagtatccagcgtggtggcgccgtcttctatcgcttgctgcagcagagcatgcgcctcgctggtattggcggttaaggagtctggtagcaccggcgtctcgcgcagttgtttctggttgcgacggtattccaccatatgcataaaagcggtgatcgtgccctccggcgtacggtaggtagggaggccggcatcgctgaataaacgtcgcgcttcctgcgaggaaaattcgccgcaccagttggtcagcacggtgacatatttaccgcgcgggtgatgcttcagagcgtcaatcagggccagggcactctcggtgcccggcgcggcggcgctgggagagtggatcaccagcagcgcgtcatagtcctgactgttgagcaaaacattcaccgcccgctgatagtgttcgctactggcgtcatcgcgtagatccagcgggttggcgatctccacgccaaccggcaacgcctggcgcagggcgtcgcgcgtctcctcgctgagagtcgccagcttaccgtttcgcaaccaaagctcatccagcgccagcgccgccggcgccgcaccgttgctgacgatcatcagtttttcaccgcgcagcgggcgcatgtggctgagcgtttccaccgcagagaacagctcatgggtatcctgcacccgcagcagaccagcgcgctgaatggccgcatcccatgccgggtccatcccggaattggcgtgcaatagcttctgcgccgccggactacggccgcttttaatcaccaggataggtttgtttcgcgaagcgctgcgcgcggcggagacaaagcggcgcgcgtcgctgagatgctcgaggtacagcaaaatggcgctggtcttgctgtcgcgggccagaaagtccagcaggtcatcgacatcaatatccaggctatcacccagggcgatgaagtaggaaaaacccatctcgcgctgttgcgcccagtcaaggatagtattggagacggcggccgactgcgagataaaggccagtttaccgcgatggatcggcaccggtgaaaagctggcgttcagcccttgccatggggccagcagtccgagactgttggggccgagcagacgcatctgatagcgcgcggcgcattcgagcagcgccgggtactgttccggctgcgaagagaggatgatgcaggtcttgcagcctttttgccctaaggcttcgagcaattcgagattacgcctggcgttagtacagagcaccgccagatccggcgtaaacggcaggctctcgatggtaggccatgccagtaccccaagaaccgccttccaggcgggggtgaccggcatcaccgggccattgaagccgccggctaacaggttgcgcatcatgagatagccagcgcgctgcggcttcattgatgcgccaataacggcgatggactttggtcgcagcagcgcttccaggcctcgttggctcataccggtctcctttcatcccagtgaccgaatgattttaaacgttttccacctggcccgctgtgatactgcccttatgctgggtttttcccgccagatagcgggtccggaagcgggtgaagtgctcgccaagcgcagcggcggccggggcatcgcccgccagatccagcagggcgatggccacttccgcggtacaatattgtccgtcggcgtgcgcctcgcgcagatggtaggcagagatgcgcgacagatcgacggagataatcggcagcgcgtcgagataaggactcttacggaacattttgcgcgcttcggtccaggtgccgtcgagcatgataaacagcggcggtttaccggacggcggcgcgctcaggacctggcgatccggcccggcataggaggccggaaatacgaccatgggctgataatcaggatgggcgaccagatcgagcagcgcctgcggcggttcggtacgcgaccactgaaacgcttcggtatctggcagaatatcggcgatgagccggccagtgttgctgggcttcatcggttccgtatcaaacatcaccaggcagaagcggctggcggcctgcgccgaggttaacgtggcgcacaggcactgcttgagcggcagcagacagcgctggcagcggcggatgcgattgccgcgcgcaaggaaagggcgggtagctcgcgcgagacgttcggcgcgcaggcgaaggacagcgttatcagtcatgggagtcgctagtgaaaaacgctattgtcgcagaggtgaaaacggggcacaagcggtgccccggaagggttattgttggccggcttcgttaagccagctatcgaatggcgcttttggcactgcgccattgagcatgtcgatcacttcgccatttttgaacatcataatggtcgggatgctgcggatacgaaaccgggcgctaagctcacgttccgcttcggtgttgactttcacaaaacgcatcttcccgctacgctcttccgcgacgtcttcaaagatcggcgcgaagctacggcagggtccgcaccatggcgcccagaaatcgacaacgaccggcagatcgtccttcaagagtttatccagcgttgccccggtcgcgttgatgacgtcgccgtcaaaaagatcgtgaccgcagcgtccgcactttgcgccatccgcgctacgatcgtccgggaggcggttcagagcctgacaactggcacaaacggtattcataactaacctctggttatgggttgcaacgtggcacgtggccgatatgtttctgtgatgttacatattatcgatgaagtgttatttgaggacaatgcgttttgttcgatgagtgcaatagaggccggcttttaaacgaaatcatggcgaagcgatgacacatcgggtaatctgcgcgcttcgcgcagcgcaggtggagaaaattgatgagcgacgaactgaaaaataaaagcggcaaggtcaaagtgatgtatgtccgcagtgatgatgattctgacaaacgcacccataacccacgtaccgggaaagggggaggtcgtccaggaaaatctcgtgttgacggccgcagccgccctgcgcgtgacgaacgaaacagccgcggtgacgatcgcaaacgtgacgaccgtaagcgtgacgatcgcaaacgcgatgattttcatcgcgacgatgcgtctccgtggcgtaccgtttcccgcgctcctggcgatgagacgccggtaaaagaagatcacggcgggatcagcgggaagagctttatcgatccggaagtgctgcgtcgtcagcgtgcggaagagacccgcgtatatggcgaaaacgcctgccaggcgctgttccagagccgtccggaagctatcgttcgcgcctggtttattcagagcgtgacgccgcgctttaaagaggcgctgcgctggatggcggccaaccgtaaggcctatcacgtggtggacgaagccgagctggcgaaagcctccggcaccgagcaccacggcggcgtctgcttcctgatcaaaaaacgccacggcacttctgttgctcaatgggtcgcgaaggccggggaagaagattgcgttctggcgctggaagatgtgggtaacccacataatctcggggcgatcatgcgcagctgcgcgcactttggcgtgaagggcgtggtggttcaggatgctggcgtgctggagtccggggcggcgatccgtacggcggagggcggtgcggagcatgttgaaccgatcactggcgacagctttatcgataccctcgatcagttccgcaaagcgggctacgcgattgtgtcaacgtccagccataatggtaccccgctgtttaaagccgagctgccgaagaaaatggtgctggcgttaggccaggaacgtgatggtctgtccgatgcggcgatttccagcgccgttctcagcgttgccatcgacggtaccggtaatgtcgaaagcctgaacgtctctgtggcgaccggcgtcctgctggcggaatggtggcgtcagaacaaggcgtgattcgcctgcctgaatgcaaaaaagccagctgatgctggcttttttttatggctgtcaatcactcgctttcagcgggaaggaccggcatccagtcgatcggcgtttcgccgcggtcaaccagccactggttggtctgtacgaaatgattgcagccaaagaagccgcgatgcgcagagagcggtgatggatgcggcgccttcagcacgcagtggcgctgacgatcgataatcgcgcctttcttctgcgcatgagagccccacagcagaaaaactactccctcgcaatgctcattgattaaagcgataaccttatcggtaaaggtctcccagcccagactggcatgcgagtgcgcctgtccggcgcggacggtcaggaccgtattcagcagcagcacgccctgtcgtgcccagctttcgagataaccgtgggtggggcgggtaaagccggggatcgtggcctccagctctttatacatattcagcaacgaaggcgggatcgcgacgcccggacgaactgagaacgccagaccgtgggcctgacccgggccgtgataggggtcctggccgagaatgacgactttgacatcgcccagttcagtaaagcgaaacgcattgaagacgtctttttgcggtggatagatggtgatcccggactggcgctcttcggcgacggtcttcagagtattgagaaaatagggttgttgcttttcatccgccagcacgtcatgccaggttaaaggggtggtcatcttgctctcctgcaaaagggtcatcgctatagcttaacggcttctttctatagaacaaaatcggcacggcttgatgccggcttttatgcaaaaaaaattgaaaatttacaaaattatttatagctcacaatggcgtaacttgatgtaaaacaataaaaacctcctatacccacgttgggtgagtggtttttattgatttatatcaaggaatgccgagggtgcggctgatatatatacactcatacaacaatggttttaccaattggccgcgaagaggccaaaatcgaataaacactgcctgggaggcatcaaatgattactggtatccaaattactaaagcggcaaacgacgacctgctcaactctttctggctgctggatagcgaaaaaggcgaagcgcgctgcctgtgcgccaaaggtggttttgcggaagatgatgtggttgcggtaagcaaactgggtgaaatcgaataccgtgaaatcccggtggacgtgaaaccggaagtgcgcgtcgaaggcggtcagcacctgaacgttaacgtgctgcgtcgcgaaaccctgctggacgcggttgagcatccggaaaaatatccgcagctgaccattcgtgtttccggctacgcggtacgcttcaactctctgacgccggaacagcagcgcgacgttatcgcccgtacctttaccgaaagcctgtaaggctaacgccagatgtgaaaacgccgggatatcccggcgtttttttactcatcgctggacgctgatggcgtcccggccgcgcttggcttccggcgcttaccgatatttttcgtatcgcggtggcgcttcttcacccgcggtttctctttttcatcttttttcttctgcgcacgcttcgccagcactttcttcgatggcttacccgtcagcttctcgctcggcgcacgggtcttcgggcgcagttcatcgataactctggctttcaacggctcttcaatatagcgaccaatcttacccagcagcaggtggtcatgagcctcgaccagagaaatggcggtcccttttttaccggcgcggccggtacgaccgatacggtgcaggtaggtatccgcggtacgcggcatatcgaagttaaagacgtggctgacgtccggaatatcgataccgcgggcagcgacgtcggtggcgatcagcacgttgacgcggccgtcggtcaggcgcttgatagcttcgtttcgcttggcctgcaccatctcgccttccagccagcaggtgttaatcccggcctcacgcagccagttagccagctcatgcacgcgctcacgcttacgcacaaacacgatagcgcgggtggcttccggctgttgcagcagattcaccagcagtttggttttatgttcgatatcgtcggcgcggtagtaccactgatggattttcttacgctcgcgggttgacggattggcggaaacttcaaccggctcctccagcagacgctcagcaaagtctttgatcgcatcgccttccagcgtcgcggagaacagcatagtctgcttgcgccagcgagtttcaccggcgatggtttcgatatcctgggcaaaacccatatccagcatgcggtcggcttcatcgaggattagggtctcgacggcgcggcagtcgaaattctcttctttaatatattgcagcaggcgaccggtggtggcgactacgatgtcctggttttcgctgaacacttccgcgtggttcatgtacgccacgccgccggtaatggtagcgatgtccagatgggtatgcttcgccagctcgcgggcgtggtcggctacctgcatcgccagctcacgggtcggcgtcaggataagaatgcgcggcgggccggatttcttacgcgggaaatcgagcaggtgctgcaacgctggcagcagatacgccgccgttttaccggtgccggtcggcgctgaaccgagaatgtcacggccatcgagcgcaggcggaatagcggcggcctgaatggctgtcgggcgagtgaaacctttatcctggagggcttccagcaggttttcgtcgagttcaagttcggaaaaagtcgttacagtcatgttctacctctgagtgggccgccgattatagacgttactgacgtaatgttcatctgtttgtaaggctatctgttctccggtattgtgcatagccttaggttcaggagtttttgtcggcaaggttattgaggatgtctcagtcgaagtttgcgctgccgcgcaatggttttaccttcaaacggttctttgtcgctcacgatcgctgcgccatgaaggtgggtaccgacggtattttgctgggcgcctgggcgccgattgccggagtgaagcatgtgctggatattggcgcgggcagcggcttgctggcgctgatgctcgcgcagcgtaccggagatgatgtgcatgtcgaggcggtagaactggacgaagaggccgccgctcaggcgcgggaaaacgccctcgcgtcgccgtgggcttcgcggattgaggtctggcaggccgatattcatcagtggcagcagtcgcaaactcgacgctatgaactgataatcagtaatccgcccttttttgccgaaggcgtgccatgcgcgacctcgcagcgagagcaggcgcggtacaccactacgctcgatcacgcctccctgctgacctgtgccgcagagcatattaccgaagaaggttttttttgcgtggtgttgccggtggatattggtaatgctttcatcgaacgggcaagggcgatgggctggcatctgcgactgcgtactgacgtggcggagaccgagctgcgaccgccgcatcgggtgctgctggctttctccccgacggcaggggagtgtttcagcgacaggctggcgatccgcgggccagagcagcaatattcggaaggctttaccgctctgaccgaggacttttatctctttatgtgagccaggggcgagagtatcgacgggccgctgtcaggcagcggctgcggatagtcgagggtataatgcagaccgcggctctccttacgcaacatcgcgcagcgtacgataagctccgccacctgcaccagattgcgcagttccagcaaattattcgagacgcggaagcgggcgtaatactcatccagctcctgctggagcatggtaatgcgccgcagggcgcgctccagcctgcgggtggtgcgcacaatccccacgtaatcccacatcagcaggcgcagttcgtgccagttgtgctggataaccaccagttcatccgggatctccacctgactttcatcccatgctggcagcgtggcgaccttctgggcgagcggcaggcgccgggtaatatcctccgcggcggaccagccatagaccaggcactccagcaacgagttcgacgccatacgattcgcgccgtgcagcccggtgtagctgacttcgccgatggcgtataaaccatcgacgtcggtgcggccattatcatccaccatcacgccgccgcaggtgtaatgcgcggcggggacgaccggcaccggctctttggttaaatcaattcccaggccgagcagcttttcataaatcatcgggaaatgctggcgaacaaacgcctcgggtttatggctgatatcaaggaacatgcagtccacgcccaggcgcttcatttcatggtcgatggcgcgggcgacgatatcgcgcggggccagctcgccgcgctcgtcaaagtccggcataaagcgggtgccatccgggcgtttaaggtgggcgccttcgccgcgcagcgcttcagtaagcaggaaattacgcgcctgggggtgatatagcgcggtggggtggaactggttaaactccagattcgccacccgacatcccgcccgccaggccattgcaatcccgtctccggaagaaacgtcggggttagtggtatattgataaaccttcgcggccccgccggtagcgagtactacggctttcgcgctgcaggtttccacccgctctttattacgattccagatccatgccccgaccacccggcgggtgcccggcaggccaatcttatccgatacgatcaaatcgacggcattgctgcgctcaaggatgcggatattaggatgggcaagcgctttatcgaccagcgtcgtctctaccgctttgccggtggcgtcggcggcgtgaagaatgcgccgatggctgtgccccccttcgcgcgtgagatgatagctctcttcgccattggcctggacctgggtgtcaaacagcactccctgatcgataagccactggacgcatgatcgggcattgctggcgacgaaagtgaccgcatgacgatcgcagagtcccgcgccggcgatgagggtatcttcgacatgggattcaatactgtccgtctcatcgaagacggcggcaatcccaccctgggcgtagaacgtcgaaccttcgctgatcggccctttactcagcacggtcaccgaactgtgctcagccaggcgcagggcaagggaaagaccggcagcgccgctgccgataatcaacacatcacaagagaagtcaggagtggtattcattgtctttgtttaatttactaaacacatttagctcacaatagcaccggtccgtgaggaatcgtacaatttttttgtctgctgttgtgacggctaaacaaaaggcgaacggaaacggcgtcttgcgcgctgaaaatgagacgcggggcaggttgatggcattggattttatagtgaaataaacggcgtgttacgatacccttcagacgggcctgcgctttttcttattgacttacctatcgtttagcaacctgggcatataatgattgataacgatctgccgccgttgccagacaaaaaacaaaaagcgtaacggaactttattgttttcatgcactccaacagtcagcttgctcataatgcagattttgggtggtgttttgaagacgcatgggaattgggtttggggagacattacctcggatgagcgagcagttaacggatcaggtccttgttgaacgggtccagaaaggagatcagaaagcgtttaatttgctggtagtgcgctatcagcataaggtcgcgagcctggtttcccgctatgtaccgccgggcgatatcgctgacgttgttcaggaatcgttcgttaaggcatggcgtgcgctggactctttccggggagatagcgctttttacacctggttataccgtatcgctgtcaacacggcgaagaattatctggttgctcaggggcgccgtccgccgtccagcgatgttgacgccaacgaggcggaaaacttcgaaagcggcggggcgttgaaagaaatttcgaaccctgagaacttaatgttgtcagaagaactgagacaaatagtttttcgtaccattgaatcgctcccggaagatttacgcatggcaattacgttacgggagctggatggcctgagctatgaagagatagccgctatcatggattgtccggttgggacggtgcgttcgcgtatcttccgggcgcgagaagctattgataataaagttcaaccgcttatcaggcgttgacgatagcggaatactggaaaagggtatcaggcatgcagaaagaaaaactttcggctttaatggatggtgaaacgctggataacgaactgctcaacgagctgagtcgttcttctgagatgcaaaaaacctgggagagttatcaccttatccgcgatacgctgcgtggcgataccgctgaggtgctgcaatttgatatctccgcccgggtgatggccgccattgaaaatgagcccgttcgtcagacggcgccgcttattcctgaatctcagcccgcaccgcatcagtggcggcagatgccgttctggaacaaggtgcgtccgtgggccagctccctgactcaaatgggcgttgccgcctgcgtatcgcttgcggttatcgtcggcgtccagcactataatggtcagtctgattccgctcagcagcccgaagcgccggtgttcaatacgctgcccatgatgggtaaagcaagcccggtaagtcttggcgtgccggctgacgcgtcagcgggaagcggccagcaggcgcaggtccaggaacagcgccgccgaattaacgccatgctgcaggactacgaactgcagcgccgcctgcacgctgagcagcttcagtttggccaggcccagactcagcaggccgcagtccaggtaccgggctatcaaactttaggaacgcaatcgcagtaatgaagcaactttggtgtgccatgtcgctcatggcaggcagcctgttgttctctgtcaacgcctcggctgatacatcgtccggggcgttgttgcagcagatgaacctggccagccagtctctcaattatgagctgtcttttgttagcatcagcaaacaaggcgttgagtcgctgcgctatcgtcacgcgcgactgaacaaccaaccgctggcgcagttgctgcagctggacggtccgcgccgggaagtggtcctgcgcggcacggaaatcagctattttgaacccggtctcgatccgttcaccctgaacggggactatatcgtcgattcgctgccatcgctggtatatagcgatttcaaacgcctctccgcggcgtatgattttatctccgtgggccgtacccgtatcgctgaccgcctctgcgacgtgatccgcgtcgtggctcgcgacggcacgcgctacagctttatcgcctggctggatgctgaaaccaagctgccgctacgcgtcgatttgctcgaccgcgacggggaaacgctggagcagttccgggtcgtctccttcaatgttggcgataacgtcagcgccagcatggagacgctggcaaaagcgaatttgccgccgcagctgtcggtgcctgaaggaggcgacaaagccaacttcaactgggcgccgacgtggctcccgcagggcgtgactgaggtttccagcagccagcgccgtcttcccacctttgacggtccggtagaatcacgtctctattccgacggcttgttcagcttctcgatcaatatcaaccgcgccacggcggccagcagcgaccagctgttgcgcaccggccgacgcaccgtcagcacgacggtgcgcgataacgcggagataaccgtagtgggcgagctgccgccgcagacggcgaagcgtatctctgacagtattaaattcaaggcagtacaatgattaaagagtgggctaccgtggtttcctggcataacggcgtggcgcaggtgcactgcgacgttaaagcctcctgcagcagctgcgcctcccgtgccggctgtggtagccgggtgctaaacaagctggggccgcagaccagccataccattagcgtgccctgcgagcagccgttggccgcggggcaaaaagtggagctggggatcgctgaaagcagcctgctgggctcagcgatgctggtgtatatggcgccgctggcggggctgtttgtaatggcgtctatttttcaggtgctgtttgccagcgatattgcgtcactttgcggcgcgctgctgggcggcgtcggcggcttcctggtggcgcgcggtctgtcgccgcgactggcggcacgtcagtcctggcagccggtgattttgaacgtcgcactgccgccggatctgctgcgtgttgatacgccttcctccgacatgggccagtgatttcactggcccttatctttatttacctttcctgttacaacgccacaatttctgcgggtatgctggatctaacagcatttcctggtttcgcggatgtagtgtagaatgcggcgttttcggattaaaaaacgtcaggcacagtacagcggcctcatgatactcgtaaggcataattaactctaaatatgaagaatatacgtaacttttcgatcatcgctcacatcgaccacggtaagtcgacgctgtctgaccgtatcatccagatttgcggtggcctttctgatcgtgaaatggaagcccaggttctggactccatggatcttgagcgcgaacgcgggatcaccatcaaggcgcagagcgtcaccctggactataaggccagcgacggtgagacctaccagctgaactttatcgacaccccgggccacgtggacttctcttatgaagtttcccgttctcttgccgcgtgcgaaggcgcgctgctggtggtagacgccgggcagggggtagaagcccagaccctggccaactgctacaccgccatggagatggatctcgaagtggttccggtactcaacaagatcgacctgcctgcggccgaccctgagcgcgtagcggacgagattgaagatatcgtcgggatcgacgcccacgacgcggtgcgctgctcagcgaaaaccggcgtcggcgtgaccgacgtgctggagcgtctggtgcgcgatatcccgccgccggaaggcgatccggacgcgccgctgcaggcgctgattatcgactcctggttcgataactacctcggcgtggtgtcgctggtgcggattaaaaacggcaccatgcgcaagggcgacaagatcaaggtcatgagcaccggccaggtctataacgctgatcgtctgggcatcttcaccccgaaacaggttgaccgtaccgagctgaaatgcggcgaggtaggctggctggtctgcgcgatcaaagacatcctcggcgcgccggtgggcgataccctgaccgccgcccgcaacccggcagacaaagcgctgcctggctttaagaaggtgaaaccgcaggtgtatgccggcctgttcccggtgagctccgatgattatgaagctttccgcgacgcgctgggcaaactgagccttaacgatgcctctctgttctacgagccggaaagctctaccgcgctgggcttcggcttccgctgcggcttcctcggcctgctgcacatggagatcattcaggagcgtctggagcgtgaatacgatctcgacctgatcaccaccgcgccgacggtagtctacgaagtagagaccacctccaaagaagttatctacgtcgacagcccgtccaagctgccgccgctgaataatattcaggagctgcgcgagccgatcgccgagtgtcacatgctgctgccgcaggagttcctcggcaacgtgattaccttgtgtgtcgagaagcgtggggtgcagaccaacatggtttaccacggtaaacaggtggcgctgacctatgaaattccgatggcggaagtggttctcgacttcttcgaccgcctgaagtccacctcccgcggctatgcgtcgctggactacaacttcaaacgcttccaggcgtcgaacatggtacgcgtcgatgtgctgatcaacggtgagcgcgtcgatgcgctggcgctgatcacccacaacgataacgcgccgtatcgcggccgcgagctggtggaaaagatgaaagatctgattccgcgtcagcagttcgatatcgcgattcaggcggccatcggtaaccacattatcgcgcgctctacggtgaaacagctgcgtaaaaacgtcctggcgaaatgctacggcggcgacgtcagccgtaagaaaaagctgctgcagaagcagaaagaaggtaagaagcgtatgaagcaggtcggtaacgttgagctgccgcaggaagcgttcctcgccattctgcacgttggtaaagacggcaaataaccctaaggagttggcatggcgaacatgtttgccctgatcctggtgattgcaaccctggtgacgggcgttttatggtgcctggacaagttcatttttgcaccgaaacgtcgtgaacgtcaggccgctgctcaggcagcgaccggcgagcaactggacaagaagacgctgaagaaagtcggcccgaaaccgggctggctggaaaccggcgcatcggttttcccggtgctggcgatcgttctggtggtacgttcatttatttatgagcctttccagatcccttcaggttcgatgatgccaacgctgctcatcggcgattttattctggtggagaaatttgcctacggcattaaagatcctatctatcagaaaacgctgatcgagaccggccatccgaagcgcggcgacatcgtggtgtttaaatatccggaagacccgcgtctggattacattaagcgcgcggtggggttaccgggtgataaggtcacctacgatccggttgccaaacaggtcactattcagccgggctgcagttccggacaggcctgcggcaacgcgctgccggtgacctattccaacgtggagccgagcgattttgttcagaccttctcccgcagcaacggcggcgaagcgagcagcggtttctggcagttgccgaagggcgaaaccaaagccgacggcattcgtcttaccgagcgtcaggagacattgggcgacgtgacgcaccgaattctgatggtgccgattgcccaggatcaggttgggatgtactaccatcagtccggtctgccgctggccacctggattgtgccgcccggtcagtacttcatgatgggcgacaaccgggataacagcgccgacagccggtactggggctttgtgccggaagccaacctggtcggaaaagcaaccgctatctggatgagttttgaaaagcaggaaggtgaatggccgaccggcgtgcggttatcgcgcattggtggaattcattaatttcctctgctgaattcacgtcgctgctgttatcgcagcggcgtgaattatttagtatttaaatccattcaaactaacgacatcccgtgtcgttgcgtatagaatatccccccgaagtttttggttgtcgctctgccgggtgacactgcacacgaaagcgtattggtctgtttcaaattactgtttgaagcgaatgctcaggtcggtttcgtgtgctgcatctttgacgcattcatttattggtaacgcatgaaccccatcgtaattaatcggcttcaacgaaagctgggctacacttttcatcatcaggagctgttgcaacaggcattaactcaccgcagtgccagcagcaaacataatgagcgcctggaatttttaggtgactccattttaagtttcgtgatcgcgaatgcgctgtatcatcgctttcctcgtgtagatgaaggcgatatgagccgtatgcgcgcgacgctggtgcgcggcaacacgctggcggagatcgcccgcgagtttgagctgggcgagtgtctgcgcctcgggccgggagagctgaaaagcggcggtttccgtcgcgaatcgattctcgcggataccgttgaagcgttaattggcggggttttcctcgacagtgatattcagaacgttgaacgcttaatcctctcctggtaccagacccgtctggacgaaatcagtccgggcgataagcaaaaggatccgaagacgcgtctgcaggagtatctgcagggacgtcatctgccgctgccgtcttacctggtggtccaggttcgcggcgaagcgcacgatcaggaatttactatccactgccaggtcagtggcctgagtgaaccggtggttggcacaggttccagccgtcgtaaggcggagcaggctgccgccgaacaggcgctgaaaaagctggagctggaatgagcgaagaaaaaaattattgtgggtttgtcgccatcgtgggtcgtccaaacgttggcaaatccacgctgttgaacaagctgcttgggcagaagatctcgatcacctcccgtaaagcgcagaccacccgtcaccgcatcgtcggtatccataccgaagggccgtatcaggcgatttacgttgatactccgggcctgcatatggaagagaagcgtgccattaaccgcttaatgaacaaagcggccagcagttcgattggcgacgtggaactggtcatcttcgtggtggaaggcacccgctggacgcaggacgacgagatggtgctcaacaagctgcgcgacgcgaaagcgccggtgatcctcgcggtcaacaaggtggataacgtgcaggaaaaagcggatctgttaccgcacctgcagttcctcgccagccagatgaatttcctcgatatcgtaccgatctcagcggaaaccggcaccaacgttgataccatcgcggcgatcgtgcgtaagcatctgccggaagcgatccatcacttcccggaagattatattaccgatcgctcacaacgctttatggcctccgaaatcatccgtgaaaaactgatgcgtttcctcggcgctgagctgccgtactccgtcaccgtggaaatcgaacgtttcgtcagcaacgagcgcggcggttacgatatcaacggcctgatcctcgtcgagcgcgaagggcagaaaaagatggtgattggcaacaaaggcgccaaaattaaaaccatcggtatcgaagcgcgtaaggacatgcaggagatgtttgaagcgccggtgcacctcgagctgtgggtgaaagtgaaatccggctgggccgatgacgagcgcgccctgcgcagtctcggttacgttgacgacctctgagttaacgcaacgtggatggatggcagcgcgcctttgtcctgcatagccgtccgtggagcgaaaccagcctgatgctggacgtcttcacggaagaatccggtcgcgtgcgcctggttgccaagggcgcacgctccaaacgctctaatctcaaaggcgctttacagccctttacccccttgttggttcgcttcggcgggcgcggcgaagtcaaaaccctgcgcagcgcggaagccgtttcgctggcgctgccgctcagcggcatcaccctctacagcggtctctacgttaacgagcttatctcccgcgtgctggagcacgaaacacgcttctccgaactctttttcgactacctgcactgcattcaggcgctcgccggggccagcggctcgccggagcccgcgctgcggcgttttgagctggcgctgctcgggcacctggggtatggcgtggattttctccactgcgccgggagcggcgagccggtagacgacaccatgacctaccgctatcgtgaagaaaaaggctttattgccagcctggtgattgataacaacacgtttaccgggcaccatttgaaagcattggcgagtcgcgagtttcctgatgttgatacgctgcgcgccgcgaagcgctttacccgtatcgccctgaagccctatctcggcggcaaaccgctcaagagccgggagttgtttcgccagtttatgcccgcgcgaaaggcgcgagccgataatacgaataatgattaacgaggattgtcatggctgaattattgttaggggtcaatattgaccatatcgcgaccttgcgtaacgctcgcggcaccgcttacccggatccggttcaggcggctttcattgccgaacaggccggcgccgacggcattaccgtgcatctgcgcgaagaccgtcgccatattaccgatcgcgatgtgcgtatcctgcgccagacgctgcacacccgcatgaatcttgaaatggcggtcaccgaagagatgctgacgatcgcctgcgaaaccaaaccgcacttctgctgcctggtgccggagaagcgtcaggaagtgaccaccgaaggcgggctggacgtcgccggccagcgcgacaagatgcgcgatgcctgtcaacgcctggcggatgccggcatcctggtctccctgtttatcgatgcggatgaagcgcagatcaaagcggcggcagacgttggcgcgccctatatcgaaatccacaccggctgctatgccgatgccaaaaccgacgccgagcaggccagggagctggaacgtattgccaaagcggccacctacgccgccagcctcgggctgaaggtgaatgccggccacggtctgacctaccacaacgtgaaagcgattgctgcgctgccggaaatgcatgagctgaatatcggtcacgcgattattggccgtgcggtgatgagcggcctgaaagaggcggtggcggaaatgaagcgtctgatgctggaagcgcgcggctaatggccattctcgggttgggtaccgacatcgtcgagatcgcccgcatcgaagcggtgatcgcccgcagcggcgatcgccttgcccgccgggtgctgagcgaccatgaatggagcatctgggagcagcaccagcagccggtgcgtttcctggcgaaacgctttgcggtcaaggaagcggcggcgaaagcgctgggaaccgggatccgtaacgggctggcgtttaaccagttcgaggtttacaacgacgagctgggcaagccgaagctgcggctatggggtgaagcaaaccttttagctgaacgcatgggagtaagcgctattcacgttactctcgctgatgaacgccactacgcctgcgccacggtgattgtcgaaagctagccaggagggcggttaaattttatccgcgtggtgcatcagcacgaatttatcccacagctgttcttcactctcgacgtgtgccggatctttcaggatcgtattcgggatcgggcacactttctggcaggttggcgtgtcgtaatgacccacgcactcggtgcagcggtcgctgttaatctcataaatgctctcacccatcgaaatggcctcattcgggcactccggctcgcacatatcgcagttgatgcattttttggtaattaacagcgccatcaggaaagtctcagaaacaacacaaacagggcgggcattatacgcccattttctgctcagaccagctttttcaccagcgcttcgctatggcgaatgcgctccggcgcccgctccagatcctgctgcaccagccccataaacagcagatcggtgagcatcatttgcgcgctggtggaggagatggccgcgctgcgcgtcgcctgctcttcggcgatagtatacaggcagtgggtcgcctgctgttgcagggcgttcgggctaaacccggtgatcgccaggatcttacagccgacgcgcagcgcttcaccggccgccatattgatctcccggcgctcgccggagtaagagatcgccagcagaagatcgtcgctggacatggcctgcaccgtcgccagcagggcatgcatatcctgctcagaaacagcgttgatgccgatcttcatcagcttccagctaaagttacgcgccaccaggccggaggcgccaatcccggtgacgatcactcgccgggcgttgcgcagcagcgtgacggcttcccgtagcgtctcttcagtgttgacgtccagcgaggcatgcatggcggcgacattgtctttaatgagtttctcgccgaccagacgcagcggatcgtcaccgcgaatgtggttatgcaccgggacggagtgcggatccgggctactcgccagcgcttcactaagggccagcttcagcgccggaaagcctttgaatcccagcttctgggcaaatttaaccacgctggactgactcacaccggcttccgccgccagctgctgcgagctgaggtgccgggtctcatcgggctggcttagaatataatcggccaactttttgtcgctcgccgccagggtgggatagcgctgacgaatacgcgttaaacagttcattggagctccgctggagccgtccggctcgtgactgacagaatttttattcgattataaggggtataccatgaattaaaaattcttaagccacaatttttccttcgcctgctactttaattctttcttaacggcaggggatgttttccctcgacatggcgtcaggctgttaagcttaccctaacgagaagcgagttctgagataaaggaggcagtttgcagcacactgaacggagagtggtgtttttcgatctggacggaaccttacaccaacaggatatgttcggcagttttctgcgctatctgctgcgccatttgccgctgaacctgttgctggtggtggcgatggggccggtgatccttgccgggctggcagtgagcggacgggcggcgcgctggccgatgagcctcctgctgtgggcgacaacctttggccgccgcgaggcggtgctgaagcggctggaagcggagtttgtcggctggtttcgccatcatgtgacggcgtttccggtagttcatgcgcggcttaccgcctacctgaccagcaccgatgccgacgtctggttgatcaccggctcgccgcagtcgctggtggagcaggtctatcgcgataccctctggttgccgcgggtgaatctgatagccagccgcaccgcgcgccgctggggcggctgggtattgaccctgcgctgcctggggcatgaaaaggtggtacagctggagaaaaagattggcgccccgctgcggctgtatagcggctatagcgatagtgagcaggataatccattgctcggcttttgccagcatcgctggcgggtaacccctcagggagagcttcagcagctggagtaatagtgtgtaattgatagcgcccatgtataatgcgccccgctttttctgctggagtggccgctgtgtctgacctcgaactcaatgatgaatactggatgcgtcatgccctgacgctggcgaaacgcgcctgggaagagggcgaggtgccggtgggcgcggtgctggtgcataacaatcaggtcattggcgagggctggaaccggccgataggccgtcacgaccccaccgcccatgcggagattatggccttacgccagggcggactggtgctgcaaaactaccgcctgatcgacgccacgctgtacgtgaccctcgagccctgcgtcatgtgcgcgggcgcgatggtgcacagccgtatcgcccgcctggtgtttggcgccagggatgccaagaccggcgccgccggctcgctgatggatgttctgcaccacccgggaatgaaccatcgggttgcgataagcgaaggcgtgctggcagagtcctgctctgccatgctgagcgacttctttcgctggcggcgggaagagaaaaaagcgctgaagaaagcccgggagcagaccggggaaagttaatacaggtggccggggagtttcatccgggcattatccatctgcttatcggcgcgaaacttgaaaaagggcagggtggtctcctgcggctgttcgagctcattggggagcacggccgggtaatcctccgccagggccagcgtttgctgctgctggcgctccttctctgacaaatagccgacaaggcttatctgatatttgcggatgttttccacataggcgtaggcctcatggccgcgggcatagccgtattttagtttgctgtaatagggtttctggctcagcaacggtaaacgcagcttaacgtccgcccagctgttaggattgcctttctgtttgcgggtgagcgccatggcgtccagcatatgggcgtaacccatattataagcggccagcgcaaaccagatgcgttcatctttcgggatcgaatccggcactttatccatcatatcctgcaggtagcgcatgccgccgtcgatactctgcgccgcatcggtgcggtcggttagacccaggctttgcgccgtattgcgtgtgagcatcatcataccgcgcacgccggtgggggaggtggcctgcggatcccagtgggattcctgccaggcgatggcggccagcaggcgccagtcaatctcgcgggcgtatttttcaaacagcggctgcacctccggaagaatattttccaccgcgcgcaggaaggtgcgggtatcgacataatcgaaatcgttgccgtggccgaggtacttctcctcgaggcgcgccagggtgccgtcttcattgatgttgttgaagaaatcaagcattgccgccgacagcgaattatcgtcgtcccgggcgctaaaccaggtgaccggctgttcgtcggtgatatcgagggccaccgccagctccggatggacgcgctgaaataggctgacggccaccgagtcggcgatggtgtaatcaagtttaccgtcaatcaccgcctgcatcagcgccgtggtaccgcgtttttcgtccacgcgccaggcaagatccgggtatttctcggcttttaaggtctgcaggtcgttgatcgccacgtggcccggagcgatagtgagctgctcggcggtcagcgccgcgagggtgcgcggccgggtattgccgacgcggtagaccagctgttgcgaaacagaatagtaggtggggccggcctgatagtttttcactcgctcctggttatagaccagtccggcggccagcatatcggcctgaccgtcgtcgaggtcgtcaaacagctgactgatgttttgccggacagttatcttaagcgttacgccaaggtagtcggcaaactgcttcgccagttcataatccagaccgaacgctttattgttcatggtggcgaaggtcattggcgagttgatggtgctgattcgcagctcgccgcgagcgataatgcccgccacgcggttctcgggtttaccagaccaggggatcgacggccacagggccgccgccagcaaaagggtgacaatgccgatcagcagataattaatctttaattttttcagagagttaatcttctgcagcttcaggttcctcagcaggcgatgtccggaaaaaacgcaaggttgtcgtcgaatgtgcggcattctgcttaataatgcgccagttggcaacttattcgcgatggtcgtcacatttattgataaacagcatcaatgattttatttctacgcaaacggtttcgtcggggcgcaggattcactataatgacgcccgtttccccccctggctcaccctgaaagcttcgaagacgagagacttatgatggaaattttgcgtggttcacctgcactgtcggcattccgtattaataaactgctggcacgatttcaggcggccaaccttccggtaagcgccatatatgccgaatatattcattttgccgatctgaatgccccgctgagcgctgacgatcgcgagcgcctggcgcgactgcttcagtatggcccgagcttaagcagccataccccgaccggtaaattactgctcgtgacccctcgccctggcaccatctctccctggtcttctaaagctaccgatatcgctcacaactgcggtctggcgcaggttgtgcgtctggagcgcggcgtggcgtattacgttgaagcctcaaccctgaccgaagcgcagtgggccgcggtggcggcggagctgcatgaccgcatgatggagagcgtcttcgacgagctggaagcgggcgagaagctgttcgctcaccatcagccgacgccggtcaccagcgtcgacctgctgggcgaagggcgtcaggcgctgattgacgccaacctccgtctgggtctggcgctggccgacgacgaaattgactacctgcaggacgcgtttacccgcctgggacgcaacccgaacgatatcgagctgtatatgttcgcccaggcgaactcagagcactgtcgccacaagattttcaacgccgactggatcatcgacggcgaacagcagccgaagtcgctgttcaaaatgatcaaaaacacctttgaaaaaacgccggactacgtgctgtcggcctataaagataatgccgcggtgatggaagggtctgaagtcgggcgctatttcgccgaccatcagaccggacgctacgacttccatcaggagccggcgcacattctgatgaaggtggaaacccataaccacccgacggccatctctccatggccaggcgcggcaaccggctccggcggcgaaatccgcgatgaaggcgccaccggccgcggcgcgaagccgaaagcgggcctggtgggcttctcggtttccaacctgcgtatcccgggcttcgaacagccgtgggaagaagatttcggtaaaccggatcgtattgtcaccgccctggacatcatgaccgaaggcccgctgggcggcgcggcgtttaacaacgaatttggtcgtccggcgctgaacggctacttccgcacctatgaagagaaagtcaccagccacaatggcgaagagctgcgtggctaccacaaaccgatcatgctggccggtggtatcggcaacatccgcggtgagcacgtgcagaagggcgagattaccgtcggcgcgaagctgatcgtgctgggcggcccggcgatgaacatcggcctcggcggcggcgcggcgtcttctatggcctccggccagtccgatgccgatctcgatttcgcctccgtacagcgtgacaacccggaaatggagcgccgctgtcaggaagtgatcgaccgctgctggcagttgggcgacgccaacccgatcctctttatccacgacgttggcgccggcggtctctccaacgctatgccggagctggtgagcgacggcggccgcggcggtaaattccagctgcgcgatattctcagcgatgagccagggatgagtccgctggagatctggtgtaacgaatcgcaggaacgttatgttctggcggtcgccccggagcagctgccgctgttcgacgaactgtgccgccgcgagcgcgcgccttatgccgttatcggcgaagccaccgctgagcagcatctgagcctgagcgacagccactttaacgatcagccgatcgacctgccgctggacgtcctgctcggcaaaacgccgaaaatgacccgcgacgtgcagactctgaaagctcagggtagtgcgctggatcgccaaccgattacccttgccgatgcggttaaccgcgttctgcatctgccgacggtggccgagaaaaccttcctcgtcaccatcggcgaccgcaccgtgaccggtatggtcgcccgcgaccagatggttggcccgtggcagatcccggtggccaactgcgcggtgaccaccgccagcctcgacagctactatggcgaagcgatggcgatgggcgagcgcgccccggtcgccctgctggacttcgcggcctctggccgtctggcggtcggcgaagcgctgaccaacatcgccgccacgcagattggcgagctgaaccgcgtgaagctgtcggctaactggatggccgccgccggccacccgggtgaagacgctggcctgtatgaggcggtgaaagcggtgggcgaagagctgtgcccggcgctgggcctgcccattccggtcggtaaagactcgatgtcgatgaaaacccgctggcaggaaggcagcgagcagcgcgagatgacctctccgctgtcgctggtcatctctgccttcgcccgtgtcgaagatgtccgtcataccgtcacgccgcagctttcgacggaagataacgccctgctgctgatcgacctcggtaaagggcacaacgcgctgggcgcgacggcgctggcgcaggtctatcgccagctcggcgacaagccggctgacgtgcgcgatgtcgcgcaactgaaaggcttctggaatgcgatgcaggccctggtggcgcagcgtaaactgctggcctaccacgaccgctccgacggcggtctgcttgtcacgctggcggaaatggcctttaccggccactgcggcgtggaagcggatatcgccgcgctgggcgacgaccatctggccgcgctgttcaacgaagagctgggggcggtgattcaggtccgcgccgcagaccgtgaggcggtggaagccattctggcggttaacggcctggcggactgcgtgcattacctcggtaaagcggttgagggcgatcgcttcgtgctgaccgccggcggtcagacggtgttcagcgaaagccgcaccacgctgcgcatgtggtgggcggaaaccacctggcagatgcagcgtctgcgcgacaacccggcctgcgccgatcaggagcatgaggcgaaagccaatgatgccgacccgggcctcaatgtgaagctctcgtttgatattaacgacgacgtcgccgccccgtacattgccaccggcgcgcggccgaaagtggccgtcctgcgcgagcagggggtgaactcccacgttgaaatggcggccgccttccatcgtgccggctttgacgccatcgacgtgcatatgagcgacctgctggccggccggaccggtctgggcgatttccatgccctggtagcctgcggcggcttctcctacggcgacgtgctgggcgcgggcgagggctgggcgaagtcgattctgttcaacgagcgcgtgcgcgatgagttcgcgaccttcttccatcgtccgcagacgctggcgctcggcgtgtgcaacggctgtcagatgatgtccaacctgcgcgagctgatcccgggcagcgacctgtggccgcgctttgtgcgcaaccagtctgaccgctttgaagcgcgctttagcctggtggaagtgacgcaaagcccatccctgctgctggaaggcatggttggctcacggatgccgattgcggtctcccacggcgaaggtcaggtggaagtgcgcgacagcgcgcatctggcccagctggagagcaaaggtctggtggcgctgcgcttcgtggataacttcggcaaagtgaccgaaacctatccggcgaacccgaacggttccccgaacggtatcaccgcggtgaccagcgaaagcgggcgcgcgaccatcatgatgccgcacccggaacgcgtcttccgcaccgtaagcaactcctggcacccggagaactggggcgaggatagcccgtggatgcgtatcttccgtaacgcgcgtaaacagctgggttaatcttcccgccgcgcttcacgcgaacgtatcagccccctgcctgacagggggctttttttatctgtgatggtcggcacgccagggtgtcgggaattgccgacaactgcgatattgtagtgtcgtcaataggcgacacttaagttattgatttaaatgatgagtaatcggtagcctatttggtgtcgctaaatagcgacaatgcgggtgaaaaataaacagtggtagtacgactgttcctgcggttaaagccatatatatcaatatgttaataaaatgttttgagagctggcatagttcatgcataatattaaccagtggctcattcaccttcttatgtcagccccttcgggacgcgctacataaacttcgaatgacgcacaaacaggtgcctgccgtccaactcctgataacagcctggctttatcagacatcgggcgaaacgtcgagtaaggcaccgcctcattcctgaacaaagccaggccttgcgcctggctttgttgtttctgcggcgcagcactcagcggtagcgcttttctccggcgcgctcctcagttagcatcgaccagagctaatgattgagacaacatccttgaagcgactctctcttttcccccgttcgctgcgtcagctggtgacgctctcctttgtgctgatcctgctgccattgctggtgctggcctggcaggcctggcagagcctgaacgccctcagcgcccaggcggcgcatattaaccgtaccaccctggtcgacgcccgacgcagcgaggcgatgatcaatgccgcactggagatggagcgcagctatcgccagtactgcgtgctggacgatccgacgctggcgcgcgtctatcaaaaccagcggcagcgctacagccagatgctggacgcccacgccggcgtgctgccggacgagaagctctggcaggcgctgcgtcaggatgtcagcgatctggcgcagctgcagtgtaaaaatagcggccccgatgcccaggcagccgccagactggaagttttcgccagtaataacagcgatatggtgcaggcgacccgggcggtcgtctattctcgtggccaacagctgcagcaggagatagccgaacgcggccagttttttggctggcaggcgctggtgctgtttctgctgagcctggcgctggtgctactcttcacccgcatgattatcggcccggtgaaaggcatcgaaagaatgatcaatcagctgggggcagggaagtcgctggacgacgccgcattgtttaccggcccgcgcgagctgcgatcggtgggcaagcgcatcatctggctcagcgagcgcctggcgtggctggagtcgcagcggcatcaatttcttcgccatctgtcgcatgagctgaaaaccccgttggccagtatgcgtgaaggtaccgagctgttggccgaccgggtcgcggggcccctgacccctgagcagcaggagattgtcgagatcctcgacagcagtagccgtaacctgcaaaagctgattgaacagctgctggactataaccgaaaacaggccgacggcccggtggctcgcgaagcggtggacctggtggacttggtggaaaacgtcgtggcggcgcacagcctgcccgcgcgggctaaactgatgcataccgaactgacgctgcaggcgcggcgttgcctggcagagcctgcgctattgataagcgtaatggataatctctactccaatgcggtgcactatggcgctgaatccggtaacatccgtatccatagctaccggcacggagagcaggtgcgtattgatgtcgccaacagcggcgaaccgatcccggccgcggaaaaaaacatgatattcgagcctttttaccaggggagtcaccagcgtaaaggggccgttaagggcagtggactggggttgagtatcgcccgcgactgcgtccggcagatgcaaggggagctcagcttagttgatgcgcccgccgggcaggtctgttttcgcattacgcttccctcagcgccggaataatccaacttatgaatcgatatcggggaactatgtcccaattcctggcctggcgccgttccctcagcggatggctgctttcaggcattgcttgtctgacgctggcggggtgttccgccggcttttcaccgcataccgcggaaggtaccgccgcccccgggcaggcgcagcatcaggtggccgattttgtcgcggtagactgcgcggatatctgggcgcacagcagcgatgccagcgacaaaaatcccctctactggctgcggggcattgactgtgccgatcgcctcgcgccggcgcaggcgcgggcggaggcgaaacgccataccgacgacagctggcaggacgcgttccgtcgcggcatcctgcttgctgatgctaaaattacccctgaggagcgccgcgacctggtggcgcgtctcgataccttcagcccgcaaatcgccgttcaggtccgcccgctgtatcagctctggcgcgacggccagacccgtcagctgcagctggtggaagagcgtgcccgttacgctaagcttcagcagtccagcgatagcgaactggagacactgcgtcagcaggagctggcgctgcgcgagcagctggagctgaccacccgcaagctggagaacctgacggatatcgaacgccagctctccagccgcaagccgggcggcaatttcggcagcgaaaaagtgccggaggtgatccatgacgatccgtaaaccggcgcgtttactgctggtggatgacgatccgggactgttgaagctactgggcatgcgcctggtcagcgaaggctacagcgtggtcaccgccgagagcgggccggaagcgctgcgcgtgctggggcgtgagaaagtggatctggtgattagcgatctgcggatggatgaaatggacggcctgcagctgtttagcgagatccagaagggccaccccggcatgccggtgatcattctcactgctcacggttcgattcccgacgccgtggcggctacccagcagggggtgttcagcttcctgaccaagccggtcgataaagatgccttatataaagccattgatgaggcgctggagcagcgctcgccggccaccgacgaagcctggcgccaggcgactgtaacccgcagcccgctgatgctgcgcctgcttgagcaggccggaatggtggcgcaatcggatgtcagcgtactgattaatggccagagcgggaccgggaaggagatcgtcgcccaggcgatccacaacgccagcccgcgtcatgataagccgttcgtggcgatcaactgcggcgcgctgccggaacagctgctcgaatccgaactgtttggccatgcgcggggcgcttttaccggcgcggtcagtaaccgtgaaggattattccaggccgctgagggtggtacgctgtttctcgacgagatcggtgatatgccggttgcgttgcaggtgaagctgctgcgcgtcctgcaggagcgcaaggtgcgcccgctgggcagcaaccgcgatatcgaaatcaacgtgcggattatctccgccacccaccgcgacctgccgaaggcgatggcccgcggcgagtttcgtgaagacctgttctaccgcctcaacgtagtgaacctgaaaataccgccgctctccgaacgcacggaagatattccgctgttggccaaccatctgctgcgtcagtccgccgatcgccataagccgttcgtgcgggcattttccagcgatgcaatgaagcggctgatggccgccaaatggccgggcaacgtgcgccagctggtgaacgtgatcgagcagtgcgtggccctgacttcgtcgccagtgatcggcgacgcgctggttgagcaagcgctggagggcgagaacacggcgctgccgaccttcgtggaggcgcgcaatcagtttgagctgaactacctgcgcaagctgctgcaaattaccaagggcaacgtcactcacgccgcgcggatggcagggcgcaaccgcaccgaattctataagctgctgtcgcgccatgagctcgacgccaacgactttaaagagtagctccgcactatagcgcaagttatgatacggtaagcaaccggttacgcgattaagacaggaaccccatgaaaaagattgatgcgattattaaacctttcaaactggatgacgtgcgtgaagcgctggccgaagtcggcatcaccgggatgacggtaacggaagtgaaaggctttggccgccagaaagggcacaccgaactgtaccgtggtgccgagtatatggtcgattttctgccgaaagtaaaaattgaaattgtggtgaccgacgatatcgtcgatacctgtgtggataccatcatccgtaccgcacagaccggtaaaatcggcgacggtaaaatctttgtcttcgacgtggcgcgggtcattcgtattcgtaccggcgaagaagacgacgcggcgatttaacgctcgccgctcgctgcagtattgccgggtggcgctgcgcttacccggcctacaaatccccgcgcgtcggggcttacagcaccttatgcgggccgaagcattcgtaatgaatgttgtctttgttgacccctaattcgaccagctgcttcgctgcaaactgcataaacgctaccgggccgcagagataatactgcatctgcgggtcgcgaatattgtccgccactgctgctaaatccatcaaaccttcgctatcaaaacgtccagcctgacggtcggcctcagtcggggtgcgataccagacgtgagaggtaaacgccggcagcgccgcgccgagcgccttcacttcatcggcaaaggcgtgaacgtcgccattttccgccgcatggaaccagttcacctgaccctgatgaccgctcttcgccagcgcatccagcatcgccagcatcggcgtttgcccgacgccgccagagagcagggtgaccggcgtctgtggcttaacgttaaggaagaaatctcccgccggggcggccagatagaccacatcgccttcgctggcatggttatgcagccagctggaaacctgaccgccttcctcgcgtttaaccgcaatgcggtagcctttgccgtccgctttgcgggtcagggaatactggcggatttcctgatattcgaagccttccggtttcagccagatggccaggtactggccaggctggtaatcggcgaccggctggccatcaaccggttcgagctcaaagctggtgataagctggctgcgcggggttttcttcacgatgcgaaacgcgcgggtcccttcccagccgccggttttactggcgttttgctgatagatctcggcttcacggccgataaagacgttcgccagcacgccgtaggctttaccccaggcatcgagcacttcctggcccggactgaacatttcatcgagggtcgccagcagatggctgccaacaatattgtactgctccggtttgatctggaagctggtgtgtttctgggcgatcttttccaccgccggcagcagggcaggcaggttatcgatattgctggcgtaggcggcaatagcgttgaataacgcttcacgctgatcgccgttgcgctggttgctcatgttgaagatctctttgagctccggattatgcgcgaacatacgatcgtagaaatgggcggttaatttcgggccggtctctaccagcaggggaatggtggctttcaccgtggcgatggtttgagcgtcaagcatagcgtgcttccttatgtgttatcttaatgatgcattttaaatgcatcttaaagaaataaccctgcgttgtaaatggttctttaacacattcccccgatccagttacaacatgaagagtttgcatcacaaacctgaaaagaaatccgttgatactgagagaggcgttattgctcaaagccttgtgtcatgcggagccaatcgtttgcgtaaaatcctttgtcaagacctgttatcacagaatgattcggttatactgtgggccgttgtccaatcggaccgcctttttaggccgaaattttattgttagctgagtcaggagatgcggatgttaaagcgtgaaatgaacattgccgattatgatgccgaactgtggcaggctatggagcaggaaaaagtacgtcaggaagagcacatcgaactgatcgcctccgaaaactacaccagtccgcgcgttatgcaggcgcagggctctcagctgaccaacaaatatgctgaagggtatccgggcaagcgttactacggcggctgtgaatacgtcgacgtggttgaacagctggcaatcgaccgcgcgaaagaactgttcggcgctgactatgctaacgtccagccgcactccggctcccaggctaactttgccgtctacaccgcgctgctgcagccgggcgacaccgtgctcggtatgaacctggcgcagggcggccacctgactcacggctccccggttaacttctccggcaaactgtacaacatcatcccttacggtattgatgagtccggtaaaattgactatgacgacatggcgaagcaggctcaggaacacaaaccgaagatgatcatcggtggtttctccgcttactccggtatcgttgactgggcgaaaatgcgtgaaatcgctgacagcatcggcgcttacctgttcgtcgatatggcgcacgtggcaggcctgattgccgctggcgtgtacccgaacccggttccgcatgctcacgttgtgaccaccaccacccacaaaaccctggcgggtccgcgcggcggcctgattctggcgaaaggcggtagcgaagagctgtacaaaaaactgaactctgccgtgttcccaagcgcgcagggcggcccgctgatgcacgttatcgcggcgaaagcggtggcgctgaaagaagcgatggagccagagtttaaagtttaccagcagcaggttgcgaaaaacgctaaagcgatggtggaagtgttcctgaaccgcggctacaaagtggtgtctggcggtactgagaaccacctgttcctgctggatctggtggataaaaacctgaccggtaaagaagctgacgccgctctgggccgcgccaacatcaccgtcaacaaaaacagcgtgccgaacgatccgaagagcccgttcgtgacctccggtatccgtatcggttctccggctgtgactcgccgcggctttaaagaagcggaagtcaaagagctggctggctggatgtgtgacgtgctggacaatatcaatgacgacgcggtcattgagcgcgtgaaaggtaaagtgctggatatctgcgcccgcttcccggtatatgcgtaagcgttagcgttgacatcaaaaaggccgcgtatgcggccttttttgcgtctggagattagcggcggtcgagggagatcgccccggggccggttattgccagcagcaggaaagcgccggcgatgctgacgtttttccagaagttaatcatgttcggcaataccgcatcgccagtcatatcccagtagtgatggccaatcaccgccgtgcccagggtgtagaaaataaagatgaccgccagcgggcgggtgaaaaagccgagcacaatcagaatcgcggcaggcacttccataatgacggcgataatcgccgccagggtcggcatcggcgcgccggaggcggccatgtactgcaccgtaccgtcaaagcccagcagtttggggtagccaaaaagaataaacagaatcaccacggcgatgcgggcgataagcagcaacagagagcgggaagcgccaaaatcaaaatagcggagtgagttcataatcagctcgttatgagagacatgtgatttaaacgtaatacacaaatttgcgctccgccacgttcgtttatgactaaaccagcgtctgcaattgctcctcaacgtacagataacctatccccatcagctgctgggcgcgcgtcagctggccaaagcctatttgggtggcgtgcgctcgcggcgtatccctgtggtcaaaggggttaaaacccgtttgtttgacgatactttccagccactgctcaccgaaggcgcagctgcgcccgtaaagccagatttgattaatatttaatatattcaggaaattatagaggcttaagccaatcgcgttggcagcgttatcaacccatgcgcgaatttgcacatctccctctttccaggcctcaatgagcgacgccgtggttaactgctcgggggcgagcgttgcttcaggctgcgttttgagccacattcgggcctgttttttcagcgcgctgagagaggcgacggtttcgaggcaaccgtatcttccgcagtcgcaggctttgccgtcaggattgacaatcgtatgcccaatctgcccgctgccgtacagactgccgcgataaatatgatcgttaatcacaaatgacgagccgataccgtagtcgacgttgatcacgcaaaaatcctgctgtgtaccctgatgctgccacttctccgccagcgccagcatcacgcagtcgttatctacccgaacctgcacgccaagccgctcctcaagcagatactttatttcgatcggtgttttccagcgtgcctggggcatggtttgtgaaacgccggtaatcggatcaacctgtccatgcacgccaagggcgagattgatgctgtgctgcgggtagcggcggtggatatgccgccagcattcaacgatggcctcaagcagggcctgaggagtgggcgcgttgaccggcaaatgctgatggccatccactgccagcaggcgggcgtcggcaagctgatattcaatgctggtcggggtgatattcatgcacagtgtccaggcgccgtgctcggggatctggtagctgccgctgttcacgccccgtttgctcaagtgttccgttgagtgaccgatcaatccctcgctaagcagctcggccagaatattgctcaccgccggaatggagagaccggtgagttgagagagctgtgatttactgagctgcttttcccgccacagatgggaaagaaaaatcgacttattggcctgccggacccgggcgttattaaagccagtacgctgcatacacttaactcccttaactatattgcgtgagcattgcgcattttaacagcgaattggcgatatagactcctgttattgcaacttttacttcgttttgtttagtggaggcatcatgtacggttcggttaaggtctggcaggaaatcatttcattaccaacgtggacaacgggcgcggaagatccgaaccctatgtttctggaaaaacgtgtttatcaaggatcttccggcagcgtctatccctacggcgtaattgataccctgaccggcgaacgcgaaatgcgcgattatcaggcagtgtggatggagaatgatttccttcgggtcatgctgctaccggagcttggcggccgtattcaccgggcatatgacaaagtcaaacaacgtgatttcgtctattacaatgaggtggttaagccagccctggtagggctgctcgggccctggatctccggcggaatcgaatttaactggccgcaacatcaccggccgacgacctttaaaccggtcgatttttctattcagcagggagaaaacggcgcgcagaccgtatggatgggggaagcggagcccatgcgcggtttgcaggttatggccgggtttacgctctatcctgaccgcgcgctgattgaaatcactggcaagatcttcaatggtaacgccacgccgcgccatttcctgtggtgggccaaccctgcagtaaaaggcggcgatgcccaccagagtgtattcccacccgatgtcaccgctgtattcgaccatggtaagcgtgatgtttccgctttcccgattgccaccggtacctactacaaagtggactattctgcgggggttgatatctcccgttataaaaacgtcccggtacccacttcgtatatggcggagaagtcggattacgattttgtcggcgcttatcatcatgacgagcgaggcgggttactgcatgttgccgatcaccatgtctctcctggcaagaaacagtggagctgggggtacggggattttggccaggcctgggatcgaaatctgactgatgaaaatggcccttatattgagctgatgaccggcgtcttcaccgataaccagcctgactttacgtggcttgcgccttatgaagagaaggtgtttgtgcaaaatttccttccctacagcgagttagggatggtgcaaaatgccaatacacagctggcactgaagctggttcgcgagtctgggcaactgcagcttggcgtatatgccattgctccgctaaatcatatcgtggttgaactcagcgctgaccatcagccattgtacgaaactcagctgacgctgaagcccggtgagagctggcagcagacgctgccggaaaatggcgtcgggcgcttaaccctcaaagtgaaaaccgccgagaaccagccgctgctggattatcaggaacatattacccaacagacgccgctgcccgaaccagctatagcgcccgcgttaccggaagcgatccacaatggcgacgagctctattttatcggccagcaccttgaacaatacaaccacgcaagccgctacgccggggattactatcgtcgggcggttgagctcgatccgcaggattatcgcaataatgttgccctcggtaccctggcgttcaacagtgccgactgggcgctggcggaacagtgtgcccgtgctgcgctacagcgcgcgcatcgtttgaataagaacccgcgagatggcgaagccagtatgctgcttgccagcgtgctggaaaggatgggggatgatgcaggcgcctgggatcactattacaaagcctcctggagcggtaactgccgtgacgccgcctggtggtcgctggcgcggctggcgatgaagcgcggtgatgttgccgatgcgctggaaaaagtaaacaccagtctgcggttcaacgccagcaatcctctggcgatggggttgaaagcgctggcattagccaacagtgggcagaagaaagcagcgctagagtttattttcgcctctcttgagcaatacccattgagctatccgctgcactgcgcgcgctggatgattgagcggagcgacgacgcgcgagaaaccctgctgcgcatcacggggcgcagaggggtcaacgccagcctgctggcgggttggctgctctctatcggacagacgtcggcggtgaaagaggttcttgcggttctggacagtcaggaagcgctgccgatgctctggcgtgcgtcgctaagtgatgatgccaatgaacgccaacagtttattgccgccgccgagcactgccatgcgcacaatgttcgtttccctaactcgctcgatgaagttcagatgctgcagtcgctgggcgacagcgcttttgcccgctatctactcggttgcttctggtacagcaaacgtcgctatgacgaggcggtgagctgctggcgcgagacgctcgaaaaatctcccgattatgcgcccgctcatcgtctgctgggcgtttactcctggaataaacagcaggatgcaacgcaggcgctggcttatctgcagcgcgccgtagcgctggagccggacaatgcgcgcttcctgtttgaactcgattttttgcaaaaattactggccaggccggtacatgagcgactgacgacgctggtggaacgtaaagccggggtgctgaagcgggacgacctgaccgctgaactgctaagcctatggaacgcgtccggtcattatgccgatgccgccgcgattctggatacgcgcgtattccatccctgggaaggaggagaagggaaaatcaccggccagtatttgctcaatcagctccatcgggcattacagttcatcgagcgtggggcgtttaaacaggccacggactgtctgaaagccgcattacgctatcccgacaatctgggggaggggcgactgcctgggcaaacggacaacgatatctggtatttgctgggctactgcgcagaacaggctggggatgcgcagcaggcggcggaatattaccagcttgcccggcaagggggctcaacgctggacgccgggcggtactacaacgatcaacccgccgattaccttttctggcagggcattgcgctgcgtaagagcggtaacccagcgcaggccgagcagcacttccgccattttatcgactgggccgcgcagcatcgggatgacgttccgcaagtcgatttttttgccgtctctcttccggacctggtggttctcgatgtatcagcgcagcagagacatctgcagcactgcttgtttattgaagcgctgggccatctggggctgggcaacgtatccgcctgccagcagaggatgcagcagcttctgcaaataaatccggctcatgataaggcgcatctgattcgccatgccctgcaaagcggcattttttcctgaacctcaatgggcgggctcggcccgcctgaaccctactgttccctgcgtttcccttatagaggaatcattatgaacaacgcgcagacacatctgaaaatgggctacgtctggacgatttgtctggtcgccgcctgcggtggtttactgtttggctatgactgggtggtgattggcggcgctaagccattttatgaagcctggttttcaattacggacccggcgcagtccggctgggcgatgagctcagcgctgttgggctgtattttcggcgcattaatttcgggatggtgcgcagacaaactggggcgcaagctgccattaattctttccgccgtgctgttcagcgcgtcggcctgggggacggcggtcgccagtcatttcgatatgtttgtggtttaccgcattgtgggcggcgtagggattggtctggcttccgctctcagcccgctttacattgccgaagtcagtccggcagagaaaagagggcgttttgtcgcggtcaatcagctcaccatcgtgattggcgtgctggccgctcagttaatcaatctgatgattgctgaaccggtggagccgggggcgacgcagcagatgattgtggacagctggaatgggcagatgggctggcgctggatgttcggtgcggaactggtgccggcgctggcgtttctggtcctgatgttttttgtccccgagtcgccgcgctggctcatgaaggccggtaaaccggagcgcgcccgggctgcgctggaacgcattggttctgccgactatgccgacaggatccttcgtgaaatcgcgcataccctggaaaaggataacaataaagtctcctacggcgcgctgttggctccccaggtgaaaccgattgtgatcattggcatggtgctcgccatattccagcagtggtgtgggattaacgtcatctttaactacgcgcaggagatttttgcctcggcggggttcgatattaacagcacgctgaaatcgatcgtcgcgacgggcgtcgttaatctggtctttaccattgcggcgctgccgctggtggataaaatcggtcgccgtaaattaatgctgcttggcgcttcgggattgacgctgatctatgtgctgatcgccggcgcttacgccatgggcattatggggtggccggtactgttgctggtgctggcggcgattgctatttatgcgttgaccctggcgccggtgacctgggtgctgctggcggagatttttcccaaccgcgtacgtggactcgcgatgtctttaggtaccctggcgctgtggatcgcctgtttcctgttaacctatactttcccgctgcttaatgccggtctgggcgcggcaggaagcttcctgctgtatggtgtcatttgcgctgccggctacctctatatcctgcgcaacgtcccggaaacgaaaggtatcaccctcgaagcgctggaagagcagctggcgcagcgtcatacgggcgtgaatgcggcgaagcaggagcagatgcgctaatggcggaagagtggattctggagaacgcgcatctgcggatgtgcgtctcttctctgggcggcaaagtgcaaagtttattctcgcggcaatatcaagcgccggtgctatatgaaaatcccgccggcggcatgtttccgatgctgccattggccaatcgcgtcgccggcaaccgttttatttttcatgggcaggagattgtcctgccttgccaccatgccgacgagtatttctttcttcacggtgacggctggttacagcgctgggatattattgagtacggcgccgagtattgtgtattacagctgcgtcggcagcatgcctgcggtttcgattatctggcgcagctccgctaccagttgctgcgtaaccagcttatagcggagctaacgcttacccactatggggaggtccctgcgctttacggctgcggctttcatccctttttccctttcgatgaacgcagcaaggttcagttccaggtcagcggttactggccggaaggggagaatcacttacctctcaactggcaaggaaacttgcccgactatgccaatttcagcgtggctcagttcggtgaagatcgttggctgaacgtgggttattccggctggggcgggcgggcgagggtaagcaatgacgtgatgaatatcacaattctatcgcaaactccgtggttgatgctgttcagaatgcaaggtgaatcattcctttgcctcgagccgcaaagccatccggtaaacgcccacaacatggacgggcagccggggctgcgagttttaggcgcgggagataagctgaatttttcgctgaaaatcatcatcgagggggcataaataacgagctatcagcagacaagagcatcttgcgcccgccggggtttatcgccagactatcgccaccattcgggaggaaatcatggtcttgcactccacgcgctggctggcgctcagttatttcacctacttttttagctacggtatttttctgcccttctggagcgtctggctggccggaaacgggctgactccggaaaccatcggcattttgcttggcgccggtctggtggcccgttttctcggcagtctgctgattgccccgcgggtgagcgatccctcccggctgatcgccgcgctgcgcgtgctggcgctgttaaccttgctcttcgcgctggccttctgggccggcagccacgtagcatggctgctggcgatcatcatcggcttcaacctgttcttttcgccgctggtgccgctgacggatgctctggccaacacctggcaaaagcagatcaccatggactatggccgggtgcggctatggggctctattgcctttgtaattggttcggcgctgaccggcaagctggtgagcctgttcgattaccgggcgatcctgctgatgctaagcctgggggtcgcctcgatgctgctcggcatgctgcttaagccgtcggtgatgccccagggggagtcgcgccagcagcagggggccggaatggcggcctggctgacgctggtgcgccaaagctggcgctttctcgcctgcgtttgtctgctgcagggagcgcatgccgcctactatggctttagcgccatctactggcagcaggccggctattccgcctcggcggtcggttatctgtggtcgttaggcgtggtggcggaagtggtgatcttcgcgttgagtaaaaaggtgttccgccgcttcagcgcccgcgacctgctgttgctctccgccgcctgcgggctgattcgctggggactgatgggctggaccacggcgctgccgggactcatccttgcgcagatccttcactgtggcaccttcacggtgtgtcatctggcggcgatgcggtatatcgccgcccgtcagggtagcgaagtgatccgtctgcaggccgtctactccgcggtggcgatgggcggcagtattgccatcatgaccgtcttcgccggtttcctctatcagaacctgcaccagggcgtattttgggtgatggccctgctgacgctcccggcgatggctatacggccaaaagcggtggcggcctagtcctcgagcatggcgcagatatgctgctgctggcgttcagtgaagtagttctccgcgtggatcagcggcggcgaaaacagcggcagcgccgtcgcatagggggtgacgataagcgtcacccctttgggcgcaccttccttctgaaagcgctctacgctctggtatttgatattcagcggcagcagcgttagttcgcgcagctgttgttccagggcctcttcaatagctgggttgtcatcggttagcaacagcacctgtttctcgtgcaggtcgcttttctgcatcagccaggcgccaaagatcaccgcgattaaaccggtctcttcctcattaaaacggatgtgccaggcctcctcgaattcgctcaatgccgcctgggtggtacgcagtaagcgagggtagagccgggtcacttcctctgtgagcgtgctgtcgatgccgatagcaaacacgctgcggatcaacgcctgcgacaaatggatatagagttgatcgctgagcccctgctcatcactgaacgctctgccagcgaggatctgaaagcggtggatcaggccggagatagccagccgcaggcggcgatcgtgcgggtgaccgtcgcggaccgggtcgggggttttgagcaacataaacagcagcgagaggaaaaaaggttctccgacatggggcggagcgccgacccgacgctgccagtggcggacaatctcctgcgccagggtgaactcggcggcggtttgagcccagcgttgctgttcctcattgaagtccggagagtatccccggtgatgttcgagcagacagtactgcaggtacaagcgcagaaactgcacgtcgcggcagtcaaactggcgattgagcgcccgcgcgcagcggttcaccagcgcctgcagattggtatcatcgtataaggtgcgggcaatgccttcctgtttaagctgcgttttcagcgccggggtaaaatgatgattaacgaactgtgggcagaggcgcagcccccgccgcagcgcatgcagcagacataaacgttggtcgagcgcggcgccttcaatccgatagctgccgtccacctgtgactggagggtcaaacggtggtaacgctgaatttcgcgtccggtctcctcaatatcctgccgggccgtggtctcatcaacgaggttgatcctgccaagccgttcagtcgtcaccgactgtccgggcagataaaacatcaggagcacctggctacggcgctgtggactggaaagcgcagatggtggttcaatgacggtcatcatctggtaagttccagttagggtttccgctaaggatagacaatgaccgcggcgtgggcagggaagagcgtccgcttttactcaggattgctggcgaagttcacagaatttttcacgtgaggaacagatgaacagagtgaaacaatgcacaagcgcggcgtttttcatggttttatcatggtcggccgctgcgcatccgcatagcttcatcagcctgcaaagcgagccggtggtcaaggacggtctgctgagcgcctttaaaatgcgctggacgatggatgaaattacctcatcggatctgctctatgatgccggaaacgccaaaccgggcagcgaagtctggaaaaagctggcggcggaggtgatggccaacgtgctcggtcagcactatttcagcgagctgtggcataacggtcagcgggttaaatttgacaatcgtcccgacggttacggcctcgaacgtgacggactgcaggcggtactcacctttactctgccgctggcgacgccgcaacccattgccgggcagacgtttaccttttccaccttcgacccgacctactacgtcgatatgttttatgacaaggatagcgatttttccctgcccgcagggctgcgggccgcctgtaaggcaacggtgatgacgccaaaaccgaacgacaaaatgctctcatacgcccagtcgctggataaagcggatgcgccgccggaggatatggcgctgggcagctattttgcccagaaggtgaccctgacatgtcagtaatttttactccgcgtgcgcgatcttcgcgctggaaagcgctgtggccgctggcgctgttgctggctgtgagcatcatcggcggcatttggctgtggcgggcgtggccgcaggtgctgatgcagagcgcagtctggcagcgttcgctcaatctggaactcagccgcctgctgcaggcggtggcggagaacccggcggcggcagggctgtcgctgctggggtttagcttcgtttacggggtgctccatgccttagggcccggacacggtaaaattgtcattacgacctggcttgccacccatcccgcgaagctgaaatcaagcattggcctgacgctggccgcctctttattacaggggctggtggccatcgcgctggtggtcgtggtgctggcgctgctgcagctgccggcgcgccagctgcacctcagcagtttctggctggagaaggggagctatttgctggtgggtgcgttagggctgctgctgtgctggcgggcgttaaaaaagctgcgtctgctgctgcgccggccaacgtttaccgcttttaccccgcatcatgttcataacgaacactgcggctgcgggcatcagcatctcccggccccggagcagctgcaggccggcgacgactggcgggctcgcgccgcgattgtcctgtcgatgggcatgcgtccctgctcgggggcgatcatggttctgctgttcagcaaggtaatcggcgtttttggctgggggatggcggcggcgctggcgatggcggcgggaacctcgttgactatcacggcgctggcgctgttggtgcatgggttccgccaactggcgatccgcctcagtcgccatcaggcgccagcgttatggaagcaggttagttgggcgacgctggcgctggccggcggcgtcatattgctggcggcggcaggggtgatgtggctcagcgccgtccctgccggcggtgggatccgtccgttttagacagacgccgggcgcaaatcctaaagtgggcgccagcgcttgccgctggcgaagcgatgctctagttttccgcttttcggcggatgacaaggagtcgctatggccgcaaatatcgtttctcccgcgcagagcgggcggttctattatggctgcgccggcgccgccgggctgctggcgggcctggcgatcgtattctggtttccatccctggccagctggtggccgtcagatctggtgcgtgtctaccacgccatgccgtatgttatgcgattcggggtggcgagtgtcgcggatattccgctggtggcctacgccaccctaacgctgtcgggcttcgtgctggccttttgtcatcccggtcacagtaaactgcccattgttgcctgggctgtgcataaccagccctcgccgcgggagatggtcgactggatcctgcgcagctgggtgttgcagttcggttttctggtgatcattttctggcgtttcgcgtttatgggtaagctaagcagcgacaggctaatgcagatcgtgggcatctttaacgacgtatgctatctggccacgctggtgctggctggaatactgctgcgcgacggctggcgcgactttcagggcgttgccgcaccggcaggcaatattcgcattccgctgatctttgccctgagcttttatctgccgtttcagctggtatggattttactcagtgcgcagcagtatgagctgccgctgtggggatggctgctgctggttccggcgatggtcggcgtgctgctcgccaggctgacggtggtagggatagcgctgtgtttccggcgctggctggggccgcagggctgtctgcgctggcgcggaccgctggccttgtttagcggcctgacggtactgtgcatcggcggcaatgcggtgattcgccagatcctcaacatgataaaatgacataaaaaaaggaagccgcggcttcctttttgacatcagtaagagattaacgcttcagcgcgtcgctcagctgctcgcgcatgttcgccagcatcgctttcaccacgcgcgggttaccggcaacgatgttgcccgtcagcatatagttatgaccgccggtgaagtcgcagacaatcgcgccagcttcacgggcgatcagctcgcctgcggcgaaatcccatggtttcagggcgatctcaaagtaaccgtcaacgcggccggcggccacataggccagatccagcgcggcagagccggtgcgacggaagtcggcacattcggtaaacatgttgccgagaatattcatgtaggtggtggcgtgctgcttcgctttgaacgggaagccggtcgcgataatggtgccgtcgaggtcgcgagcgttgctgccgcgcagacggtagccgttcagctgcgcgccctggccgcgggtcgcggtaaacagttcgttacgcatcggatcgtagaccaccgcgacttcagtacgccctttgatgcgtacggcgatggaaacagagaagtgcggcagacgtttaacgaagttggtggtgccatccagtggatcgataacccattgaacatcctgctcttcgccagcgtgttcaccgctttcttcggtgataatggtgtgctgcgggtaagatttgcgaatggtttcgataataatcgcttcggcggctttatcgacgttggtcacaaaatcattgctgcctttctggctggtttctacggtgtctggcgtttcgtagtgtttggcaattaaattacccgccttgcgcgcggcgcgcacggcgatgttcagcatcggatgcatcggtctctctcactggatgttaaagaacgggaaaaaacggcgcatataatagcagccaaatctgcttatgtctccgttttatggtagcatgcacgaataatctttagccgaagaaccataatgctgcaaaatattcgaatcgtactggtagaaacttcccataccggcaacatgggctccgtagcccgcgcgatgaaaaccatgggcttaactaacctgtggctggtcaatccgctggtcaaacccgattcgcaggcgatagccctggccgcgggcgccagcgacgtgatcggcaacgcgcagattgtcgatacccttgatgaagcgctggcaggctgtagcctggtggttggcaccagcgcgcgctcccgcacgctgccgtggccgatgctcgacccgcgcgaatgcggtctgaaaagcgtcgccgaaggtcagcatgcgccggtggcgctggtctttggccgcgagcgcgttggtctgaccaacgatgaactgcagaagtgccactatcacgtggcgatcgccgccaacccggagtacagctcgctgaacctggcgatggcggtgcaggttatcgcctatgaagtgcggatggcctggctggcggcgcaggagcaagcgcagccggcggttgagcatgaagaggcgccgtacccgctggtggacgatctggagcgattctacgaccatcttgagcagacgctgctggcgaccggctttatccgcccgaatcatccggggcaggtgatgaacaagctgcgtcgtctgttcacccgcgcgcgtccggaaagccaggagttgaacatcctgcgcggcatgctggcgtctattgagcagcagaataaaggtaagtaaccgcgttaacgccggatggcgcttcgcttatccgggcaacgaatcgggctcgcctggcgggatgaaggtatcaggctatgcggaagtaaaacggcacggaaagccaaatacctgactaaaacagtcaagtaaatagttgaccaaattactcgggaatgtcagacttggccctgctatgcaatacccatattaataaaaagcccggccaggggcgagtttgaggttaagtaagacatgagactgacatctaaagggcgttatgccgtgaccgcgatgcttgacgttgcgctcaactctgaaacgggcccggtgccgttggcagatatttcagagcgtcagggaatttcgctttcctatctggaacagctgttctctcgcctgcgtaaaaatggcctggtttccagcgttcgtggcccaggtggtggttatctgttaggtaaagacgccggcagtatcgccgtcggcgaagtcattagcgccgtggacgaatccattgacgccacccgttgccagggcaagggcggctgtcagggcggcgataaatgcctgactcacgcgctgtggcgcgacctgagcgagcgcctgaccggcttcctgaacaatatcaccctcggggaactggtgaataaccaggagatcctcgatgtttccggtcgtcagcatcagcacgaaacccagcgcaatgcgcgcacccaggacgcgattgacgttaaactgcgcgcctgagtgacccgtcccgtttcgggctgcggctgacagggcaaggcggcgcgaaacggcgggacaacgattataaagagctttcagaatcaggccgggatgctccgacattccgtgtactcggtcgtacatcaagccggttgcctgattccttgcattgagtgatgtacggagtttaagagcaatgaaattaccgatttacctcgattactccgcaaccacgccggtggacccgcgtgttgccgagaaaatgatgcagttcctgaccatggacgggacctttggtaacccggcctcccgttcccaccgttttggctggcaggctgaagaggcggttgatatcgcccgcaatcagattgccgagctggtcggcgccgacccgcgcgaaatcgtctttacctctggtgcgactgaatccgacaacctggcgatcaagggtgcagccaacttttatcagaaaaaaggcaagcacatcatcaccagcaaaaccgagcataaagcggttctggatacctgccgtcagctggagcgcgaaggcttcgaagtgacctacctggcgccgcagagcaacgggattatcgatctgaaagagctggaagcagcgatgcgtgacgacaccatcctggtttccatcatgcatgtgaataacgaaatcggcgtggtgcaggatatcgctaccatcggcgagatgtgtcgcgcccgcggtatcatttaccacgtagacgccacccagagcgtgggcaagctgcctatcgatctgagccagctgaaagttgacctgatgtccttctccggtcacaaaatctacggtccgaaaggcatcggcgcgctgtacgtgcgccgtaagccgcgtattcgtatcgaagcgcaaatccacggcggcggccacgagcgcggtatgcgttccggtactctgcctgttcaccagatcgtcggcatgggtgaagcttaccgtatcgccaaagaagagatggaaagcgagatggcgcgtctgcgcacgctgcgcaaccgtctgtggaacggcgtgaaggatatggaagaagtgtacctcaacggcgacctcgagcagggcgcgccgaacattcttaacgtcagcttcaactatgttgaaggcgagtcgctgattatggcgctgaaagacctggcggtttcctccggttcagcctgtacttccgcgagccttgagccatcctacgtgctgcgcgcgttaggcatgactgatgaactggcgcacagttctattcgtttctctttaggtcgtttcactaccgaagaagagattgactatgccatcgatctgattcgcaaatccattggccgtctgcgcgagctttctccgctgtgggaaatgttcaaacagggcgtggatctgaacagcattgaatggtcacatcactaattcggcaccaataaggagaattcatcatggcttacagcgaaaaagttatcgatcattacgagaatccgcgcaacgtcggctcttttgacaacagcgacgagaacgtcggcagcggcatggtcggcgcgccggcctgcggcgacgtgatgaagctgcagattaaagtcaacaatgaaggtatcattgaagacgcgcgcttcaagacctacggctgcggttccgctatcgcttccagctccctggttaccgagtgggtgaagggcaaatcgctggacgaagcgcaggcgatcaagaacaccgatatcgccgatgaactggaactgccgccggtgaaaatccactgctcgatcctggcggaagatgcgattaaagccgcgattgcggattacaaaagcaaacgtgaagcaaaataattagttgaggttttgttatgtcgattactcttagcgacagtgcagcagcgcgagtcaatgccttcctggcgaaccgcggtaaagggtttggcctgcgcctgggcgtaagaacctccggctgctcgggtatggcctatgtactggagtttgttgacgagccggcggctgaagacaccgtgtttgaagacaaaggcgtgaaggtcgtgatcgacggcaaaagtctgcaattcctcgacggcactcagctggacttcgtcaaagaaggcctcaacgaagggttcaaattcactaaccctaacgtcaaagatgagtgcggctgcggcgaaagctttaacgtataatcggtactcctcaaccccaccgcggtcacgccgtgcgtggggttttaatttagatgcatgaccctgaggttactatggactatttcaccctcttcgggttaccagccagctataccctctcgcttgaacaactggctgtccggtatcaggatctgcagcgccagtaccatccggataaatttgccagcgcgcctgcggcggaacagcttgcggcggttcagcattccgccactataaaccaggcctggcagacgctgcgccatccgctgactcgcgcagaatatctcctttcgctgcatggcttcgatctggccagcgagcagcataccgttcgcgataccgcgttcctgatggaacagctggaattgcgcgaagagctggatgagatcggccaggcgaaagacgacgcgcggctggaaggttttatcaaacgggtgaaagcgctgtttgatacccgtcagcagctgatggttgaccaattgcataatgagagctgggaggcggcggcggacacggttcgtaagctccgtttcctcgataaactgcgcagcagtgctgaagaactcgaagaaaaactgctcgatttttaattttcggaagcaattatggccttattacaaattagtgagcccggcctgagcgccgcgccgcaccagcgtcgtctggcggccggtatcgacctgggcaccaccaattctctggtggctaccgtgcgtagcggccaggccgagactctgcccgatcatcaaggccgctatctgctgccgtcggtggtgaactaccacgcttcggggctgaccgtcggctatgacgcccggcttaacgccgctcaggatcctgccaataccatcagctccgtgaagcggatgatggggcgctctctcgccgatattcaaaaccgttacccgcatctgccgtatcagctgcaggccagtgaaaacggcctgccgatgatccagacggccggcggcctgctgaacccgattcgcgtctccgccgatatcctcaaagcgctggccgcccgggcgaccgaagcgctggccggcgaactcgacggcgtggtcattaccgttcccgcttacttcgatgacgctcagcgccagggaaccaaagacgcggcgcgtctggcgggcctgcacgtgctgcgcctgctcaatgagccgaccgcggcggctattgcctacggcctcgactccggccaggaaggggtgattgcggtctacgatctcggcggcggcacctttgatatctccattctgcgtttaagccgcggggtgtttgaagtgctggccaccggcggcgactcggctctcggcggcgatgatttcgatcacctgctggctgactacctgcgcgagcaggcgggcttcagcgaccgcagcgataaccgtctgcagcgtgagctgctggatgccgccatcgcggcgaaaatcgccttgagcgatgccgaggcagcgcacgtcgaggtcggcggctggcagggcgatatcacccgcagccagtttaacgatctgattgccccgctggtaaaacgtaccctgatggcctgccgtcgggcgctaaaagacgctggcgttgaagcgcaagaagtgctggaagtggtgatggtcggcggttcgacccgcgtgccgctggtgcgtgagcgcgttggcgagttcttcggtcgcactccgctgacctccattgacccggacaaagttgtcgccatcggcgcggcgatccaggccgatatcctggtgggcaacaagccggacagcgaactgctgctgctcgacgttatcccgctgtcgttaggcctggaaaccatgggcggcctggtggagaaagtgatcccgcgtaataccaccattccggtggcccgcgcgcaggagtttaccaccttcaaagatggccagacggcgatgtccattcacgtgatgcagggcgagcgtgaactggtccaggattgccgttcgctggcgcgctttgcgctgcgcggtatcccggcgctgccggcgggcggggcgcatattcgcgttaccttccaggtggatgccgatggcctgctgagcgttacggcgatggaaaaatcgaccggcgtggaagcctccatccaggtgaaaccgtcttacggtctgaccgatggcgaaatcgccaccatgattaaagattcgatgagctacgccgaacaggatattcaggcgcgcatgctggctgaacagaaagtggaagccgcgcgcgtactggagagcctgacaagcgcgctggccgccgacgccgcgctgttaagcgccgcggagcgtcaggccatcgatgccgctgcggagcaggtacgcgccgccgcggcaggcgacgacgctgacgcgattaaagaagcgattaaaaatatcgacacacaaacccaggaattcgccgctcgccgtatggatcagtcggtccgtatcgcgctgaaaggccaatccgtggacgaggtttaaaatgccaaaaattgtatttctgccccaccaggacctgtgtccggatggcatcgttgtggaagctgagaccggtgaaaccattctcgatgccgcgctgcgtagcggtatcgaaattgaacacgcctgcgaaaaatcctgtgcctgcaccacctgccactgcatcgtgcgtgaaggttttgactcgctggcggaaagtagcgaagatgaagacgacatgctggataaagcctgggggctggaacctgacagccgtctgagctgccaggcgcgcgtcaccgacgaagatctggtcgttgagatcccgcgttacaccatcaaccacgcacgcgagcactaatatggcactgaaatggaccgacagtcgcgaaatcggcgaagccttgtatgacgcttacccggatctcgacccgaaaaccgttcgctttaccgacatgcatcagtggatttgcgatttggaagagtttgatgatgatccaaacgcatccaatgaaaaaattctcgaggcgattctgctagtctggctagacgaggccgaataatttcgcgttaagcgaaaacattttaacgggctgccatagggtggcccgtttgctaagaaggataatgataatgaccgaagctatgaagattacgctttctactcagccagccgatggacgctggggagaaaaagcgacctggagcatcaataacgacggcatcgctctacatctcaacggtaaagacgacctcgggcttatccagcgcgcggcgcgcaaaattgacggcatgggcatcaagcacgtcgccctgagcggcgaaggctggaacaccgatcgcgcctgggccttttgggccggctataaagggccgaaaggtcagcgtcaggtcgaatggccatcccttgacgacgcgcagcgcagcgagctggataaccgcctgacgatcatcgactgggtgcgcgacaccatcaatgcgccggcggaagagctgggtccggagcagctggcgcagcgcgctgtcgacctgctgtgcggcgtggcgggtgagaagataagctatcgcatcaccaaaggcgaagatctgcgcgagcagggctatcttggtctgcataccgtgggccgcggctccgagcgcccgccggttctgctggcgctggactataacccgaccggcgataaagaggcgccggtatacgcctgcctggtgggcaaaggcatcacctttgattccggcggctacagcatcaagcaaagcgcctttatggattcgatgaaatccgatatgggcggtgcggcgactatcaccggcgcgctggcttttgccattacccgtgggctgaacaaacgcgtgaagctctacctgtgctgcgccgacaacctgatcagcggtaacgccttcaaactgggcgatattattcattatcgcaacggcaaaaccgttgaagttatgaacactgacgcggaaggccgcctggtgctggcggatggcctgattgacgcctcggcgcagaagccagagctgatcatcgacgccgccaccctgaccggcgcggcgaaaaccgcgttgggcaatgattaccacgcgctgttcagctttgacgatgcgctggcgaatcgcctgctggcgagcgctcaggcggaaaacgaagccttctggcgtctgccgctggccgagttccaccgcaaccagctgccgtccaactttgctgacctgaacaacaccggcagcgcggcctatccggccggcgccagcaccgcggcgggcttcctgtcccacttcgtggaaaactaccatcagggttggctgcatatcgactgttcggcaacctaccgcaaatctgccgttgagcagtggtcggcgggcgccaccgggcttggcgtgcgtaccattgctaacctgctgacagctgagtaatggcctggccgggtggcgcccgcgcttacccggccaggaaaaccatatgcccgcgtggacgaatggccgccgggcaattcattgtgaagtagccaaactatgtcagatacaaaaaatgaattagaaaccctgctggaaaaagcggcgactgagcccgcccatcgtccggcatttttcagcgcgctgctggaggccaccgtctgggtgccgggcagggcagccgatggcgagcagattgtcgaagatagcgcgctggatctgcagcattgggaaaaagacgacggtacctcggtgatcccattctttacctcgctggaggcgctgcagcaggcggtggcggatgaacaggccttcgtgatgatgccggcccgcacgctgatggcgatgacgctgggcgaatcgttattcctcaacccgaagctgccgagcggcaaagagttcaccccacgggaaatcagccatctgttaggcgaagagggcagcccactgagcacccagacggtactggaaggcggcgaagcgctgctgctgtctgaagtcgccgaaccgccggcgcagatggtcgattcgctgaccacgttgttcaaaacgctgaagaccgtcaagcgggcgtttctgtgctcgattaaagagcgcgccgatgcgccggccaacttattgatcgggattgaagcggaaggggatattgaagccattatccagaccaccggcagcgtggccaccgataccttgccaggcgacgaaccgatcgatatttgccaggtggtggaaggcgagaagggcatcagccattttatgattgcccatatcacgccgttctatgaaaagcgctggggcagcttcctgcgcgattttaagcagaaccgcatcatctgacagcgggggcggcagcccccgctgtttctttctgcttccagttcgaggcacaaaagcggggtggcaaaagctaatgcagggcggcaaagattcgcggataggcagacaccatgtgatagaggagaaatcccgtcacgcacagtgtgacaatgccgttgaagagcgccatatccccgcgccaggcccggcacctctcttcgcccagcagagaacgtagcgctgccaccagcccgccgaccagcataaacgccagtaacacccctgccatttgcgcgataacaatgtaccagcccagcggcgtattcacgtcccgggcgctcatcagcgcgatctgcgccggcaaaatcgtctggaacccgagggtaagtatcatgagaagacgcaagtccgccagctgagcgtcgaacgtccgggccaggcgccgggcgtcacgcaggagcagcacccctgacgccaccgccgcggcaacgctgatgtgctggagaataaaaatatataacgccagggttccggatgggactcgggacaaaaagaacagattgcaaaagaccatgaccagcaggccaaattttgtgacccaggcacggaatacctcgccgggccagcgccggcttgacgctgggttatgcatcatccacgcggcaagggtcgacttaccgtaaccgggcgcgagcagcaccatcagaaaacccagcagcgcctggtgaccataggtgatcagtgggacctcttccagagtgaccccgagaaagcgggtatacacggagactggcgcaggcaccaggcttagccatgtccggttccattgcggccaaaaataaaggatcgcgccgcctgccagcaggccagctatacctcccagccagggaaggcgcggtgaataagccgaatgtgggttagagactaatgccattttcactccttgtggtgacatcagattgggatggactggatgcgctatcagccctgaggaattctgtaccagtgctctgcctccccatcaggcaaagcgaactcggcaggaacaagccctgcggcagcacagagtaaccggtttagcgagaagcagaagaaagtgggagagaaaatcagaaattatttagtgaccgcggaacgggaggcccgcggtcacgccgtgtttacggagcggcaggggccggttcaatcggcagatcgctccgcgcgccccattcgctccaggagccgtcatacaggcagacgccgttcacgccaagcgtggtgagcgccagcacgaccaccgccgccgtcacccccgagccgcagctggcgatgatcggccgttcaaaatcgacaccctgacgtaaaaagatgtcgttcagctcgtcaacggttttcagttcgccgttaatcaccagatccgtccacggtacgttcagcgcgccggggatatgcccgcggcgcaggcccgggcgcggttcgtcggcctggccgttaaaccgggccgccggacgggcatcgacaatctgcgccgatccttcatggctgaccaacaggacgtcggtcagacgcttaatttgttgaggatcgaaccgcacgtcgaattccccttcggccacctccggcatcccttgttccagcggcagttcgtcgcgccgccagccctccagtccgccggccagaattgacaccttctctacgccaaaggtgcgcagcatccaccacgcgcgcggggcggaaaacagattgccttcgtcatagaccaccagatgcttatcgctgcagacgcccagttcgcgcatggcgacggcaaacgcttcggcccgcggcatcatatgcggcagcggactggtgtggtcggatagcgcctcgatatcgaaaaacagcgcgttcggcacatggccggcgcggtattccgcggccatatcccgcagggcctcctgcccggcgggcgccatgcgggcgtcgataatctgaatttccgggtcatcaatatgttctgccagccagtcggcagcgacaaaaaacgaggtggacataggtgcctccgttttattattcatgactgaattgtcggcgttttagctggcgctgacaagttaaggacgccagagtggggacggcgtcacggcacttttctgattaatcggcagaaacccgcttcgtcactgttgagaagcgccgccataacgcataataaatgtgacaaattgcatcaggctcatcggccgaggggttagaaggatgaaaccatttcgtttagcggcgctatcactagcgctccttaccgcattttcattaaccgggtgtgatgacagcggtacaccgcaggcctcggccccggcgccagccgcggatagcaacccaggcgcgacggcaaaaccggaccgcgcccagctggcggcgctggcggaaaaaagccagggtaaagcgctgacgctcctcgacgcctcggaggtgcaactggatggcgccgcgaccctggtgctgacgttttccgtcccgctgcagccggaccaggatttctcgcgcagcgtgcatctggtcgacaagaaaagcggtaaggtggacggtgcctgggagctggcgccgaatctgaaagagctgcgtctgcgtcaccttgagccaaagcgcgagctgattgtctcagtcgacccgacgctgaccgccctgaacaaggcgacgctcgataaaccgtttgagaagaccctgaccacccgcgatatcgcaccgagcgttgggtttgccagccgcggctcgctgctgccgggcaacgtggtcgccgggctgccggtgatggcgctgaacgtcgataatgtcgacgttaatttcttccgcattaagccggaatcgctctccgcctttgtcagtcagtgggaataccgtaactcgttaagcaactgggaatctgatgaactgctgaagatggcggatctggtctacagcggccgcttcgatctcaacccggcgcgtaatactcgcgaaaagctgctgctgccgctgagcgacatcaagccgctccagcagcctggcgtctacgtggcggtcatgaacccggcgggccgttatagctacagcaacgcggcgacgctgtttaccctcagcgatatcggcgtctcggcgcatcgctaccataaccggctggacgtttttacccagagtctggaaaacggcgccgcccagtcgggcattgagatgcagttgctcaatgccaaagggcagaccctggcggaagcgaaaagcgacagccagggccacgtcaccctgcaaaccgataaagaagccgcgctgctgctggcgcgcaaagaggggcagaccacgctgctcgacctcaagctgccggcgctggatctggcggaattctctatcgcaggcgcgcccggctttagcaaacagttctttatgtttggcccgcgcgatctctatcgtcccggcgaaacggtgatccttaatgcgctgttgcgcgatagcgacggcaagccgctggcggagcagccggtgaaactggaggtggttcagccggacggccaggtgatccgctcggtgatgagcaaaccagtgaatggcctgtaccagtttacttatccgctcgacagcggcgcggttaccggcatgtggcacattcgcgccagcgccggcgacaaccagccgcgcgaatgggatttccacgttgaagactttatgccggaacgcatggccctgaacctgacgccgcaggccgcgccagtcgcgccggatgccgacgtcacctttggcgttagcggcgcttatctctacggcgcgccggccagcggcaaccagctgcagggcaagctgttcctgcgcccgctgcgcgacgccgtcgctgcgctgccgggcttccagttcggcgatattgcggaagaaaacctctcccgtagtctggatgaagtccagctgacgctggacgaaaaaggccatggcgaagtgaccacctcaagccagtggcaggatagccattcgccgctgcaggtggtgctgcaggccagcctgctggaatccggcggtcgcccggtgacccgtacggttaagcagccgatctggcccgccgaggcgctgccggggatccgcccgcaatttacgctgaaggacgtttacgattaccgcaccgataccaccgtgaaacagccggtggtggatgaaaacagtaacgccgcgtttgatatcgtctatgccgacgtcaaaggcgagaaaaaagcgatctccggtctccaggtgcggctgatccgcgagaggcgcgactactactggaactggtccgacagcgaaggctggcagtcgcagttcgatcaaaaagatctgcaggagggcgaggagtcgctggacctgcaggccggccagatcggcaaagtgagcttcccggtggagtggggatcctatcgcctggaggtgaaaggaccggacgacgtggtcagcagcgtgcgcttctgggcgggctacagctggcaggataacagcgaaggcgccggcgcggcgcgtcctgaccgggtcaccatgaagctggataaaccgagctataaaccgggcgacaccatcaggctgcacatcgccgccccggcggcgggtaaaggctacgcaatggtggaatccagcgaagggccgctgtggtggcaggaaattcacgtcccggcggaggggatggacctgtcgatcccggtggataaaacctggaatcgccacgacctctacctcagcacgctggtggttcgtcccggcgataaatcgcgctcggcaacgccgaaacgcgcggtgggcctgctgcatctgccgctgggcgatgaaaaccgtcgcctgacgctggcgctggaggccccggacaaaatgcgccccaaccagccgctgacggtgaaagtgaaagccagcgtcaaagagggcgaggcgccgaaacaggtcaatgtcctgctctcggcggtggatagcggggtactgaatatcaccgattacgctaccccggatccgtggaacgccttctttggccagaagcgttacggcgcagatatctatgacatctacggccaggtgatcgaagggcagggacgtgtggccagcctgcgcttcggcggcgatggcgacgagttaaaacgcggcggcaaaccgccggttaaccacgtgacgatcgtcgcccagcaggcgcagccggtggtattgaacgatcagggcgaaggcacggtgacgttacccattggcgattttaacggcgagctgcgggtgatggcccaggcgtggacggcggatgacttcggcagcagcgaagataaagtggtggtggccgccccggtcatcgccgagctgaacactccgcgcttcctcgccagcggcgatactacgcgtctggcgctggatctcagcaatctgaccgataaaccgcaaaccctgcaggttcaccttaccgccagcgggctggtaacgttgagcgagggtcaactgccgccggtgcaactggcgccgggggcgcgcagcacgctgtttataccagtgagcgcgctggcgggcttcggcgatggtcaggttaatgccaccatcagcggcctgagcctgccgggcgaaaccttcgccccgctgcaaaaacagtggaaaatcggcgtgcgtccggcgtacccggcacagaccgtcaacagcggcgcagtgctgcagccaggtgaaagctggcagccgccggcggcgcagagccagggctttgccccgcaaacgctgcagggccaactgctgctcagcggtaaaccaccgttgaatctcgcccgctatatccgcgagctgaaagcctatccttacggctgccttgagcagaccgccagcggcctgttcccgtccctgtataccagcgcggcgcagctaaaggcgctgggcattagcggggacagcgacgaaaaacgccgcgcggccatcgatgtcggtatttcacgcctgctgcagatgcagctggaaaacggcggctttgcgctatgggatagagaggggccggaagagtactggctgaccgcctacgccatggacttcctcgtgcgcgccagcgagcagggctatagcgtaccggtcaacgccattaataaaggcaacgagcgcctgctgcgctatctgcaggagccgggcctgatgaccgtgcgctacagcgacgacgcccaggctagccgctttgccgcccaggcatacgccgcgctggtgctggcgcgtcagcaaaaagcgccgctcggcgccttgcgtgaaatctggagccgtcacgaccaggcgcgatccggcttgccgctgctgcagctcggcattgcgctgaaaactatgggcgatgcgccgcgcggcgacgccgccctgaagctggcggttgccaccccgcgccaggatgagaatcgttggctgggcgattacggtagcccgctgcgcgataacgccctgaagctggcgctgctggaagagaataagctgctgccggaggtgcaaactcagctgttgagcacgctgtcggaagaggcctatggccagcgctggctgtcgacccaggaaaccaacgccttgttccttgccggacgtacgctggcggacctgccgggcagctggcaggcgcaaacctcgctgcaggcggagccgctggccggcgacaaagcgcaaacccgcaacctcgacggcgatcggctggcggcgctgcaggtgagtaataccggcagtcagccgctgtggctgcgtctcgacagcagcggctatccgcaaagcgcgccgcagccgggcggtaacgtcctggggattgaacgcactattttcgatacccaagggcagcagaaatcgctgtcttcactgcgcagcggcgaactggtgctcgtcaagctggaggtgaccgccaaacgcaacgtgcctgacgcgctggtggttgatctgttgccagccggtctggagctggaaaaccagaatctggccagcagcagcgccagcctgcaggagaatggcgacgcggtgcaaaacctgcttaaccggatgcagcaggcggatattcagcatatcgagttccgcgatgaccgtttcgtcgccgccgtcgctgtcaatgaaggccagccggtgacgctggtctatctggcgcgggcggtgacgccgggcacttatcaggtcccgcagccgcaggtggaatcgatgtatgcgccgcagtggcgggcgacaggagcggccagcggtccgctcaccgtgacgccgtaaatgcgcgtattgcctcgggtaaaacgccgctggcgctggctggcggcgtttatttttctgctgtggctggcggtgctggcggccgatcgcctgtggccgctgccgctgcatgacgtcacgcctgcccgtgtggtggtggcggaagacgggacgccgctgtggcggtttgccgacgcgcagggcgtctggcgttatccggtcacgctcgccgacgtgtcgccgcgctatctgcaggcgctcatccagtatgaagaccgctggttctggcgccatccgggggtcaatcccttcgcggtgctgcgcgccgcctggcaggatcttacttccgggcgagttatctcgggcggcagcacgcttaccatgcaggtggcacgcctgcttgatccccatccacgcaccttcggcggcaagctgcgccagctgtggcgagcgctgcagctggagtggcatctgtcaaaaagcgacattctaaccctctatttgaaccgcgcgccgtttggcggcaccctgcaggggatcggcgcggccagctgggcctatctcggtaagccgcctgccaggcttagctacggcgaggcggcgctgctggcggtacttccccaggcgcccagtcgtttacgtccggaccgctggccgcagcgggcccaggcggcgcgtgataaagtgcttacgcgaatggtcagccagggcgtctggccggagcaggcggtaaaggaagcgatggaggagccagtatggctgtttccgcgccagatgccgcagctggcgccgcttttttcacgccgcgcgctggcgaccagtcgtgatgaaaaggtggtgacgactctggatgccggactgcagcggcaactggaagatctggcgctgaactggaaatcgcgcctgccgccgcgcagttcgctggcgatggtcgtcgtcgaccacacggatatgaaagttcgcggctgggtgggctcggcggatatcaccgacgacagccgcttcggccatattgatatggtctcggcggtacgctcgccggggtcggtgctgaaaccctttatctacgcgatggcgatggatgaggggctgattcacccggcatcgctattacaggatgtgccacggcgttttagcgattatcgccccggtaatttcgacagcgggtttcatggcccggtgagcgccagcgaggcgctggttcggtcgctgaatctgccggcggtgcaggtgctcgaagcctatggaccaaaacgctttgcggctaatttacgcaacgccgggctgcccctgacgctgcccgctggcgcagagccgaatctgtcgctaatcctcggcggcgccggggcgcggctggaagatattgtcgcggcgtacagcgccttcgcccgccatggcaaggcggcgcggctgcgcctgaagccgagcgatccattgaccgagcgcgcgctgatgtcgcccggggcagcatggatcgtccggcgtattttggccggcgaagcgcaaccggttcccgatgcctcgctgccgcaggcggtgccgctggcgtggaaaaccggcaccagctacggctatcgcgacgcgtgggcggtcggcctcaatgcgcgatatctgataggcatctggaccgggcgcccggacggtacgccggtggtgggccagtttggcttcgccagcgccgtaccgctgctcaaccaggtcaataatctgctgctggcccgcccggcgatgagccgcggcgggctgccgagcgatccgcgcccggcaacggtcagccaggggacaatctgctggcctggcgggcaggatctgccggcgggcgacagcaactgtcgtcgtcgcctggccagctggcttttggatgccagccagccgccgaccctgctgctgccggggcaggagagcgtacgcgggatccgcttcccggtgtggcgcaatgaacacggcgaacgggtggcggcggattgtcccggcgctcgggaaagccaggtcgaagtctggccgctgccgctggatccctggctgccggccagcgaaaggcggcgcgcgcgcctgggtccggcatcggagtcatgcccgccgttacagactcaggataccgcgccgctggtgctgtccggcatccgtgatggggcggtgataaaacgtctcccgggtgaggcgcgggtgatgttgccgctacaaaccagcggtggggaggggcggcgctggtggtttattaatggcgaaccgttagaggccgccggcgcaagaaccacgctaatgctggataaacccggcgagtggcagttggtagtgatggatgaagcgggtcagacggcggccgccagcttcaccctgcaataaccagggtaaatttgttgttggcggtttgtgttttcaatactcatcttattttaacaaaatgttaccttcatccgtaggcaggggcggggatgctcattataatgcgcgccaggccatacaatcgtatgtgcaacaacagaacatttaattagaggtaatcatggctattgaacgtactttttccatcatcaaaccaaacgcggtggcaaaaaacgttattggcagcatcttttcccgctttgaagctgcagggttcaaaatcgtcggcaccaaaatgctgcacctgaccgttgaacaggctcgtggtttctatgctgagcacgaaggtcgcccgttcttcgacggtctggttgagttcatgacctccggcccgatcgtggtttccgttctggaaggcgaaaatgcggtacagcgtcaccgtgacctgctgggcgccaccaatccggcaaacgccctggcgggtaccctgcgcgctgactacgctgacagcttcaccgagaacggcacccacggttccgactctgtagaatccgctgcccgcgaaatcgcgttcttctttgctgaaggcgaggtttgcccgcgcactcgctaatctcctgcgtctttcacgccacagcattgttggcttccttcgcgcaccccggtcacatagttatctatgctcccggggatttgcgaactcgccgtctcgctgtgacctgaaatactttggagatacaaacctcgtcttttcgaccgtcgcgggtcggctgcgcgcgttcaccccggtcacatagttatctatgctcccggggattaatgagaggctcctgcctctcaccggaggccagcctacggctggtcaaattcgttcccgacgaatttgtcacttgcttgccgccttgcgacaatcgaaaagccttagaggattgagcagtcagttacagattttttttcattgctttgtgcaaacgtggcaatgatgcgccagaatttgtagaatatagcgcccctggacgagcagtcgctctccggggcgtttctttttcaacccacctggggccataacgtgtaataacgaggccggaaaatattatgtctgaacaaattgtcacgcctgataccgccgctctgacggtgccgaacaaagatgccaaaatcaacctgctggatttaaaccgtcagcagatgcgcgagtttttcaaaaacatgggcgagaagcctttccgcgccgatcaggtgatgaaatggatgtatcactactgctgcgacgactttgatgagatgaccgacatcaacaaagtcctgcgcagtaaactgaaagaagtggcggagatccgcgccccggaagtggttgaagagcaacgctcaaccgacgggaccattaaatgggcgattgccgttggcgatcagcgcgtcgagaccgtctatatcccggaagaagaccgcgccaccctgtgcgtctcctcccaggtaggctgcgcgctggagtgcaaattctgctccaccgcccagcagggctttaaccgcaacctgcgggtatccgaaattatcggccaggtttggcgcgcggcgaagatcgtcggcgcggtgaagaccaccggcgtgcgtcccattaccaacgtagtaatgatgggcatgggcgagccgctgctgaacctcaacaacgtcgttccggcgatggaaatcatgctcgacgatttcggctttggcctttccaagcgtcgtgtaaccttgtctacctccggcgtggtgccggcgctggataaactcggcgatatgatcgacgttgcgctggcgatctccttgcacgcgccgaacgacaccattcgtgacgaaatcgtcccgatcaacaaaaagtacaacatcgagacgttcctcaactcggtgcgcggctatatttcgaagtccaacgccaaccagggccgggtgaccatcgagtacgtgatgctggatcacgtcaacgacggcaccgagcacgcccatgagctggcggcgctgctgaaagatacgccgtgcaagatcaacctgatcccatggaacccgttcccgggcgcgccgtatggccgcagctccaacagccgcatcgaccgtttctccaaagtcctgatggagtacggctttacgaccatcgtgcgtaaaacgcgcggcgacgatatcgatgccgcctgcggccagctggcgggcgacgtcattgaccgtaccaagcgtacgctgcgtaagcggatgcagggcgaagcgattgacgtaaaagcggtctgacaaatgatgacccgtgcagcgcaggcggcacgggtcatatttatggccgatagccaggcgaaatacgctgattcggttaataattacggtgcgtttttgtcgactttgaggcagtatgtagcggcacaacaaccgcttagcattcaattttgattcgtctctgtgatcgcgcggctgacagtcctatactgtgaggctgacgtagcacagatgtctcgcggcgccggctttttcccgcgctgaactttaaatttcacgtaccagtagttgtagcgaatgaatactgaagccactcaagatcatcaagaagcaaacaccacgggcgcgcgtctgcgtcacgcccgcgaacaactcggacttagccagcaagcggtggccgaacgcttatgcctgaaggtgtccacggttcgtgatattgaagacgataaggcccccgccgacctcgcctccaccttcctgcgcgggtacatccgctcctacgctcgcctcgtacatattccagaagacgagctgctgccgatgatggccaagcaggcgcccatccgcgcggcgaaagtcgcgccaatgcagagtttctctttaggcaagcgccgcaaaaagcgcgacggctggctgatgagcttcacctggctggtgctgtttgtggttatcggtctgagcggcgcctggtggtggcaagaccataaggcgcagcaggaagagatttcgaccatggccgatcagtcttccgcagagctgaacggcggcgacgccaacagccagaacgtgccgctggataccagcgcccctgcagccccgaccgccgatagcgccgcgaacagcgcgccaaccgataccgccagcgcaccgaccaccagcgcgccggcccagacgccagcggataataacgctgtcgtggcgccttcccaggccaatgtcgataccgcggggacgacgccggcagctccggctaccaccccagcctcgccgttgccgaccgatcaggcgaacgtcacgactccggcggcgtcggcgcaggatctggtgatgaacttttccgccgactgctggctggaagtgagcgatgccaccggtaaaaaactgttcagcggcctgcagcgtaaaggcggtaacctgaacctgagcggtcaggcgccgtataagctgaaaattggcgccccggccgcggtacagatccagtatctgggcaagcctgtcgatttaagtcgttttatcagaactaaccaggttgcgcgtctgaccctcaatgccgaatcatcaccggcgcagtaacagacgggtaacgcgggagatttttcatgcataaccaggctccgattcaacgtagaaaatctaaacgtatttacgttggtaatgtgccaattggcgatggggctcccatcgccgttcagtcaatgaccaatacgcgcaccaccgatgtggcggcgaccgtaaatcaaatcaaagcgttagagcgcgtaggcgcggacattgtccgtgtctctgttccgacgatggacgctgctgaggcgttcaaacttatcaaacagcaggttaacgtcccgctggtcgccgatatccactttgactaccgtattgcgctgaaagtggcggaatatggcgtcgactgcctgcgtatcaacccgggcaacatcggcaacgaagagcgcatccgcatggttgtagattgcgctcgcgataaaaacatcccgatccgcatcggcgtcaacgccggctcgctggaaaaagatctgcaggaaaaatatggcgagccgacgccgcaggcgctgctcgaatccgccatgcgtcatgtcgatcatctcgatcgtctgaacttcgatcagtttaaagtcagcgttaaagcctccgatgtcttcctggcggtggaatcctatcgtctgctggcgaaacagatcgatcagccgctgcatctcgggatcaccgaagcgggcggcgcgcgcagcggcgcggtaaaatcggcgatcggtctgggactactgctgtccgaggggatcggcgatacgctgcgcgtctcgctggcggcggatccggtggaagagatcaaggtcggcttcgatatcctcaaatctctgcgtattcgttcccgcggcattaactttatcgcctgcccgacctgttcacgccaggagtttgacgttatcggtacggtgaatgctctggagcagcgtctggaagatatcatcaccccgatggatgtttcgatcatcggttgcgtggtgaacggcccgggcgaagcgctggtctccacccttggcgtcaccggcggcaacaagaaaagcggcctgtatgaagacggcgtgcgtaaagatcgcctggacaacaacgacatgatcgaccagctggaagcgcggatccgcgccaaagcctcgatgctcgatgaagcccgtcggattgatgttcaacaggttgaagcaaaataacgtgttgggaagcgatacgcttcccgtgtatgattgaacctgcgggcgcgaggcgccggggttcatttttgtatatataaagagaataaacgtggcaaagaacattcaagccatccgtggcatgaacgattatctgccgggcgaaaccgctctctggcagcgcattgaaggctcactgaagcaggtgctcggtagctacggttacagcgaaatccgtttgccgattgtagagcagaccccgttattcaaacgcgcgatcggcgaagtgaccgacgtggttgaaaaagagatgtataccttcgaagaccgcaatggcgacagcctgacgctgcgtccggaagggacggcgggctgcgtacgtgccggcatcgaacatggtctgctgtacaatcaagaacagcgtctgtggtacgtcgggccaatgttccgtcacgagcgcccgcagaaaggtcgctaccgccagttccatcagatcggcgccgaagtgtttggcctgcagggcccggacatcgacgcggagctgattatgctgaccgcgcgctggtggcgtgagctgggcatctccgagcacgtcagcctggagctgaactccatcggttcgctggaagcgcgcgccaactaccgcgacgcgctggtggcatacctggagcagtttaccgataaactggatgaagacagtaaacgccggatgtataccaacccgctgcgggtgctggactccaaaaacccggacgttcaggcgctgctcaacgacgcgccggcgctcggcgattatcttgacgaagagtcgaaagcccactttgccggcctgtgcgcgttgcttgacgatgccgggatccgctacaccgtcaaccagcgcctggtgcgcggccttgattactataaccgcaccgtgttcgagtgggtgaccaccagccttggttcccagggcaccgtctgcgccggcggtcgttacgacggcctggttgagcagctgggcggtcgcgctaccccgggcgtgggttttgccatggggctggaacgtcttgttttactggtccaggcagtgaatccggaatttaaagccgatcctgttgtcgatatatacctggtagcctccgggaccgatactcagtctgctgcaatgcgtctggctgagcaggttcgcgatgcgctgcccggcgtgaagctgatgaccaaccacggcggcggcaactttaagaagcagttcgcccgcgctgacaagtggggggcgcgcgtcgcgctggtggtcggtgaatcagagattgctgacggaaacgtggtagtgaaggatttacgctcaggtgagcaaactaccgtaacgcaggagagcgttgccgcgcatttgcgcacacttctgggttaatctcccgggaattattagtcaggagaaggactgcgtggaaacttttaacaacgagaacgatcaggtcgatgcgctgaagcgtttctttgccgaaaacggcaaagcgctggcggtcggggtgattttagggattggcgcgctggttggctggcgctactggacctcccatcagcaggataccgccagagacgcgtcgctggcttacgagaaggcgacttccgcgctgaaatcgaatacgccagaagtgctgtcaggggcagagaaattcgcggctgacaataaaaatacctacggcgccttcgcctctctcgagctggcacagcattttgttgaacagaacgatctgccgaacgctgaaaagcagctgcagcaggggctggcggccgcatctgatgataatctgaaatcggttatcagtatgcgtctggcccgcgttcagctgcaaatgaaacaggctgatgcggcgctgaaaaccctcgacagcatcaaaggtgagggctggaccgccattgtggccgatttgcgcggcgaaattctgttgagcaaaggcgataagcaaggggcccgtgcggcgtgggaagctggcgtgaaaagcgatgcttctcctgcgctcagcgaaatgatgcgtatgaaaatgaataatttgtccatctgagagggactcgatgcaattgcgtaaattactgttgccagggctgctttccgttaccttgctgagcgggtgttcgctgtttaatagcgaagaagatgtggtgaaaatgtcaccgctgccgacggtagaaaaccagtttacgccgtccacgtcctggagcacctcggttggcgatggtatcggcgaattttactctaaccttcatccggcctttgccgacggcgtagtgtatgctgctgaccgtaaaggcaccgtcaaagcgctgaacgccgacgacggcaaagaggtgtggtcggtgaatctggcggagaaagatggttggttctcgcgcacgccagcgctgctttccggcggggtgaccgtctctggcggccatgtttatatcggcagcgagaaagcgcagctttatgcgctgaataccagcgatggtaccgtggcctggcaaacccgtgtcgccggcgaggcgctgtcgcgtccggtggtgagcgatggcatggtgctggtgcataccagcaacggccagctgcaggcgctaaacgagactgatggggccgtgaagtggaccgttaacctcgatatgccggcgctctccctgcgcggcgagtctgcgcctgcgaccgcctacggcgcggcgatcgtcggcggcgacaacggccgcgtcagtgcagtattgatgcagcaggggcagatgatttggcagcagcgtatttctacggccaccggcccgacggaaattgaccgcctgaacgacgtcgacacgacgccgatcatcgttaacggtgtggtttatgcgctggcttataacggcaacctgaccgcgctggacctgcgtagcggccagattatgtggaaacgcgagctgggttcggtgaatgatttcatcgtcgatggtaaccgtatctacctggttgaccagaacgatcgcctgctggcactgaccaccgacggcggtgtaaccctgtggacgcaaagcgatctgctgcaccgtttgctgaccgcgccggtgttgtataatggcaatctggtcgtcggcgatagcgaaggctacatgcactgggttaatccggaagatggccattttgtggcgcagcagaaagtggacagctccggcttcctgaccgacccggtggttgccgatggtcgactgctgatccaggcgaaagacggtacgctgtacgcgattacgcgttaattaccgctgtcgtgagtgattaagaaacggcccctggcagacaggggccgttttgacttttttaaaaacgtcgttaagacgatgttgcttagtgattgtatgaggcatttaacatgatacctgtggtcgcgcttgtcgggcgccctaacgttggaaaatccacgctctttaaccgcctgacgcgcactcgtgatgcgctggttgcggatttcccggggctgactcgtgaccgtaagtacggtcgggccgaagtcgaaggccgcgaattcatctgtatcgataccggtggtattgatggtacggaagagggcgtggaaacccggatggcggagcagtcgctgctggcaatcgaagaggccgatgtggtgctgtttatggtcgatgcgcgtgcgggcctgatgccggcggacatcgcgatcgctaaacacctgcgctctcgtgaaaagcccaccttcctggtggctaacaaaaccgacggcatcgacgtcgaccaggcgatggcggacttctggtcgctcggcctgggcgatatctatccgattgccgcttcgcacggccgcggcgtgaccagcctgctggagcaggccctgctgccatgggtcgatgaggttaatccgcaggaagaagtggatgaagacgccgaatactgggcgaaattcgaagccgagcagaatggcgaagcggaagaagagccggaagacgacttcaatccgcaggatctgccgatcaagctggcgattgtcgggcgtcctaatgtcggtaaatcaaccctcaccaatcgcatcctcggtgaagatcgcgtggtggtctacgatatgccgggcaccacccgtgacagcatttatatcccgatgcagcgtgacgagcgcgaatacgtgctcatcgataccgctggggtgcgcaagcgcgggaaaatcaccgacgtagtggaaaagttctcggtgatcaaaacgctgcaggcgattgaagacgccaacgtcgtgctgctggtgatcgatgctcgcgaagggatctccgaccaggacctctcgctgctgggctttattcttaacagtggccgttcgctggtgatcgtcgttaacaagtgggatggcctgagtcaggaagtgaaggagcaggtgaaggagaccctcgactatcgtctgggctttatcgactttgcccgggtgcacttcatctccgccctgcacggcagcggcgtcggcaacctgtttgaatcggtacgcgaagcctacgacagcgctacgcgccgcgttagcaccgcgatgctgacccggatcatgaacatggcggcggaagatcatcagccaccgctggtgcgtggccgtcgcgtgaagctgaaatacgcccacgccgggggctacaacccgcctatcgtggtgatccacggtaaccaggtcaaggatctgccggattcctacaagcgctacctgatgaactacttccgtaaatccctggacgtgatgggcacgccaatccggatccagttcaaggaaggggaaaacccgttcgctaacaagcgtaacaccctgacgccgaaccagatgcgtaaacgtaagcgcttgatcaagcacatcaagaaaagcaaataatcattaaacccgcttcggcgggttttttgtggccgccatgccggtaaatgtcaaaaccttccgccataatcccgcgatacttcgccgggaacagagcggctcaaaggtggacttactatgcagattggttttatcggcctcggcgcggtggtggaaaccgcctatttaccggcgctgcgtcgcctgggggacgtcatcgaccgctgccagggctatgacctggactgcagcagagcgctgccggggatccagcgctgtagttcgctgtcggcgctgctggccgaacccctggatacgctcttcattaccacctcatcacttcagcatctgcccgtactggagagggcgttagccagcggcatttcccgcatcgtggtggaaaagccgatcgtggccaaccttgagcaggccgcccggctgcgggcgctgctggcgccgactgagcaggccgcgcgggtgctggctcttgaccactggatggcgcgaggcgttgcgctgaacgctcctggcccgctgtggcgggcggaaggggaggccagcggcctgcctccgccgcacctgtcagcgcaggatatcgtctggatcgaaggttatttgcaggagccaagcggctttaacagcgctggtgagccggtcgcactcaattttgccaccggggagctggatacccggcagctgcgtcaccctgatggggtgatcctcgatatcggcacccatgtcctggcgatgctccgcgaaaccctgcacgccagcggaggcgatacggcgctgagcctttcccttcgggtggcgaaagaccgcctcggccatgacattgctcctggggatacgagcactgccgagggggaggcgcatctgcagggaaccctgggcactatcccgctcaatatctggctcaacaaatacgcgggtcccgcgggcgggcaaaagggaatgcggataggactgcgggacgggcgaataattaccttcgatcgcgcccctgagggcgaagtggtgacgctacaggacggcgagcgggtgcagcgctggacccggcccggggcgatctatacgcactgtcttgatgagcagatcctcggcgctgataatctgtttatccgggcgccggacagcgtggccgggctaacgcagcgtaggcttgaggaagtggaatggctgctcaggttgcagcagcaattacgcggcccgcattaaacccggaacatgataaaataggtgcagataaacgttgaaaggaatggttatggaacttgattgccctctgtgccacgcgccgttagatgtcaaaggcagtagcgcgcattgcgcccagtgcgaaagggtgtttacccttgaggcccgctgcccggaatgccaccagccgctggaggtgctgaaggcgtgcggcgcggtggattacttttgccagcatgggcatggccttatctcgaaaaaacgggtggaatttattccgctggtttagtgggcgaaggctttctggcccgcgtttttttcaccgtcgcgatctgcttcacttcgctttcgacccagccgtctttcaggcgggtggtgagcagatcgccggttttgacctgttttgtctgcttcagcaccgtaccgtcgctcaccgaggtgacgctgtagccccgcgccagggtggctaaggggctcaccgcctccagatgggtcaccgcgttgccaaaccgttcacgccgctcgctgaggcggccacgcataatttccgccagccggtattccagctgctggatccgcgactgcgcgcggtggatccgcggctgcgggttgtagtgattcagacgctgaacggtgcgcttttgccgctgttctgcgcgcttaagctgtgactccacggcgatacgcatccgctggcgcaggcgttccagggcggtctgctggcgggccaagcgcagctgtggatgctgttgctgcaggcgatggaacagctgggtaaaacggcgctggcgactggcgaggaaatagtccatcgccatttccagccgctgctgtccggactgcagctggcgcagcagctcctgctggttgcggctgacgatttccgcggcggctgagggagtcggtgcccgcaggtcggcaacaaaatcagcgatcgtgacgtcggtttcatggccgacggcgctgacgatagggatctggctggcgaaaatagcccgcgccacccgctcatcgttaaaactccacagatcctccagcgaaccgccgccgcgtccgacaatcagtacgtcacactcctggcgcgcgttggccagcgcgatggcgcgcacaatctgcccgggggcgtcgtcaccctggaccgcggttgggtagatgatcaccggcagcccgggatcgcggcgcctgaggacatggagaatatcgtgcagcgcggcaccggttttcgaggtgatgacgccgacgcagtgggcgggagaggggagcgcctgcttatgtttttgctcgaacagtccttccgccgttaactgcgctttcagctgctcatacttctgctgcagcaacccttcgccggcgggctgcatgctttcgacgataatctggtagtcgccgcgcggctcatacagcgtgatgttggcgcgaaccagcacctgctgcccgtgctgcgggcggaacgtgacccggcggttgctgttgcggaacatcgcgcagcgcacctgggcgttatcgtcttttaaggtgaagtaccagtggccggaggagggctggctgaagttagagatctcgccgttgatccaaacctggcccatttcgcgctcaagcagcagacgcaccgtctgattgaggcggcttacggtaaaaattgcgggggattgagagggtaacatgtgagcaagatcaaactttaaatcagcaggttattcagtcgatagtaacgcgctcagaggggatggcaagtattatttgcaaaaaagggtagatgcaatcggttacgctctgtataatgccacggcaatatttatccaccctggtcgagatattgcccatgctacgtatcgctaaagaagccctgacgtttgacgacgtcctcctcgttcccgctcattctaccgttctgccgaatactgccgatctcagcactcagctgacgaaaaccattcgtctgaatattcctatgctctccgcagccatggataccgtaacggaagcgcgtctggctattgccctggcacaggaaggcggcatcggctttattcacaaaaacatgtccatcgagcgccaggcggaagaagttcgtcgcgtgaagaaacatgagtccggcgtggtcaccgacccgcagactgttctgccgacgaccactctgcgtgaagtgaaagagctgaccgagcgcaacggtttcgccggctacccggtggttaccgaagaaaacgagctggttggcatcatcaccggccgcgacgtgcgtttcgtcaccgatctgaaccagccggtcagcgtctacatgacgccgaaagagcgtctggtcaccgttcgtgaaggcgaaagccgtgaagtggtcttcgctaagatgcacgaaaaacgcgttgagaaagcgctggtcgtggatgaaagcttccacctgcgcggcatgatcaccgtcaaagacttccagaaagcagaacgtaaaccgaacgcctgtaaagatgagcagggccgtctgcgcgtaggcgcggcggtcggcgctggtgccggcaacgaagagcgcgtagatgcgttggtagcggcaggcgttgacgttctgctgatcgactcctcgcacggtcactcagaaggcgttctgcagcgtatccgtgaaacgcgcgcgaaatatcctgacctgcagatcatcggcggcaacgttgccactggcgcaggcgcacgcgcgctggcggaagccggctgcagcgcggtgaaagtgggcatcggcccgggctccatctgtactacccgtatcgtcaccggcgtgggtgtgccgcagatcaccgctgtttccgacgcggtggaagcgctggaagggaccggtattccggttatcgctgacggcggtatccgtttctccggcgatatcgccaaagcgatcgccgccggtgcggcggcggtgatggttggctccatgctggcgggtaccgaagagtccccgggtgaaatcgaactctatcagggtcgctcttacaaatcctaccgcgggatgggctcccttggcgcgatgtccaaaggctcctctgatcgctatttccagagcgataacgctgctgacaaactggtgccggaaggtatcgaaggccgcgtggcctataaaggccgcctgaaagagatcattcaccagcagatgggcggtctgcgttcctgtatgggtctgaccggctgtggtaccattgacctgctgcgtaccaaagctgaattcgtacgcatcagcggtgcgggcattcaggaaagccacgttcacgacgtgaccatcaccaaagagtccccgaactaccgtctgggctcctgatttcttcgcccgaccttgcgtcgggcgatttatttactctgtttcacttgcctcggaattagcgtcaatgacggaaaacattcataaacatcgcattctcatcctcgacttcgggtctcagtatactcagctggtggcgcgtcgcgtgcgtgagctgggcgtctactgtgagctgtgggcatgggatgtcacggaagcacagatccgcgaatttaatccaagcggcatcattctttccggcggcccggaaagcaccaccgaagagaacagcccgcgcgcgccgcagtatgtgttcgaagccggcgtgccggtatttggcgtctgctacggcatgcagaccatggcgatgcagctgggcggccatgtagaaggttctaacgagcgtgagtttggttacgcacaggttgaagtggttaacgacagcgcgctggtgcgcggtatcgaagattccctgaccgcagacggcaaaccactgctggacgtgtggatgagccacggcgacaaagtgaccgccatcccagcggacttcgtgaccgtcgccagcaccgacaactgcccgttcgccattatggccaacgaagaaaaacgcttctacggtgtgcagttccacccggaagtaacccacacccgtcaggggatgcgtatgctggagcgcttcgtgcgcgacatctgccagtgcgaagcgctgtggaccccggcgaaaatcattgacgacgccgttgagcgtatccgtcagcaggttggcgacgacaaagtgatcctcggcctctccggcggtgtggactcttcggtgaccgcgatgctgctgcaccgcgctatcggcaaaaacctgacctgcgtattcgtggacaacggtctgctgcgcctgaacgaagcgcagcaggtgatggagatgttcggcgaccactttggcctgaacattgttcacgttgaaggcgagcagcgtttcctcgacgcgctggcgggtgaaagcgatccggaagcgaagcgtaaaattatcggtcgcgttttcgtggaagtgttcgacgaagaagcgctgaagctggacgacgtcaaatggctggcgcagggtactatctaccctgacgttatcgagtctgccgcttccgccaccggtaaagcgcacgtcatcaaatctcaccacaacgtgggcggcctgccgaaagagatgaagatgggcctggttgagccgctgcgtgagctgtttaaagacgaagtgcgtaagatcggcctggaacttggcctgccgtacgacatgctctaccgtcacccgttcccgggccccggccttggcgtgcgcgtgctgggcgaagtgaagaaagagtactgcgacctgctgcgtcgtgcggacgctatcttcatcgaagagctgcacaaagctgatctgtataacaaagtcagccaggcgttcactgtgttcctgccggttcgttccgtcggcgtgatgggcgatggccgtaaatacgactgggtggtttccctgcgtgcggtggaaaccatcgacttcatgaccgcgcactgggcacacctgccgtacgatttcctcggccgcgtctccaaccgtatcatcaatgaagtgaacggtatctcccgcgtggtgtatgacatcagcggcaagccgccagcaacgattgagtgggagtaatccccggcgttagctgagtaaaacgaaaccctctgtgtttacagagggtttttttatagctgctacattaaggtctcccacctgacggcaagcgctaatcgcgcatatattgatgcatctgggccgccgtcagatcccactggcttccttcaaacgggggcatatagctgccatcatcttcgccaatctcagcggcagtgagctgattgagtttatcgttcattgtcattaacagatcccggtatttctctggctcccgggcgaggttatgattttcttcggggtcgttaaccagatcgaaaagttcaacatcattattctccagcagctcggccagggaagcaggaatatgatgctgcttgagcgaaaagtagcgggcaaatttatagtgtccatcgttgatcatacggatccctgagcgatgggaaaaatcaggatggagtgacgcgatcgcttttttaaattgatcgtgcgggagtttttctccagccagctttctgaattttgccgtgtattgcgcatccatatacaggatcatgccgtaacaataaagcgaacccggacgcagcgcatttaagcccgcttgctcaggatgcgccagtaatgggctcatatcccggcctttcctgccctccaggactttctctcgcagcgaccgatcgcgtccagtcagaccaatcagggtcggtactaaatccagatgattagtcaaactgttgcagcggatgtttcccggatacgccggatggcgaatgatcatcggcacatggatctgctctttgtacaccgaggaacctttaccatgcatctggtgggagcctccgagttccccatggtcggcggtaaagacgataatcgtattttgcgtcagttgaagattatcaagttcattgagaatcgcctcaagatgctggtcattatcgcgaatacagttgaaataataatccagtaatttgcgccagcgccggtcttcatcggggaactgtccctccatcaccgccctggcattctggtactctttatgggcggcaggtctgccaggctcatcgagcggctgatggcggtttgcaggcagcggatagtctggccagctttgctgatagatttggttgtgcggggggtgggttggcagcagggtgtggttttctttatccattggccctttccactgcacctgctcaccatgctcatcggtgtcgataaacatgacatcgtgggggttaaccaggtttactgccgcgaaccagggtttattttcatcattcagcgggcggccggtgttacgtagccaactaatggtctgccccgtggtgactgaatcaaagaaatagccgcccttacttttcccgatgacatcgccaatgccgtgataatcagagaaaccatacttttccataatttcatgcagtcgcggcgtcgggatctcacccaggtccatttcttctaccgatttaccagcgaccggctgatcgatctcccgggtaagatgccatttacctttatacgccgtgtaataacccagttcacgcatcatatggcccacggtacgtaattccgggtccagatcgtaattcatccaggggaagccaagattatcaaacatccgggtgtgcggcatatggagcccggtgtacatgacagagcgcgatggcgtacaaacgttggccgtgttctgatgattggtaaaagtgatacccgttttcatcaggcgttcccggcccggcaccggaaagggataccgctcgaaataacgttcctgatcgcaggttatgagtaaaatattgtagccttcgggcagtgtgtcagggatttcgccggtgaaaggaatatcccatgccgctttcgcggcggcattattttgtgcggcgtttcccgtctctggtaacaggctcacgacagcggcaatccccagacctttgaggagatcgcggcgatttccatctattttatttggttctttcatcttcagactccgttaattgtaatatattttgccgaatctccgggataagactcataatgagcgcgggcggctggcaatttaataaaagccttcgcatgacgttcatatagggcgtgatatggccgaaaaaagttaaatagccgctgcacaggtaattctgtgcttcgtcgtcatggatggtaaaacggtgtttagggcatcccccatggcaggcaaagcgccagtggcagctctgacagcgggcagagagttggcccttttgcttcccgaactgttgctgaaatggcgagctcgccatcgctgccatagcatcttgcttcagattacccagtttatattccgctgagacaaagtgatcgcagctgtagacatcgccgttttgctccaccagtaaactctgcccacagacaggctgcatggtgcagagcgtggcgggctggccggcccatacgccgagcagattatcaaagtactggataaacaccctgccaacatcgttttccagccagtcgtcgaaaacactgcacaaaaatttgccccagccctcaggggtaactgaccagggagcaggggagtcaacgagaggaataaactggagatggtgaaggtttagctcgcggctcaggcagcgatagagacttttcccctggcttgcagactggcgactgaccaccaccatggcattcaccggaacgtcatgctgctgcaggcagcgtatggcctgcacaactttttcccaggtgggttttccgcagcccgtcgtacgccaggtgtcgtggagtgacgcagggccatcaatggataatccgaccagaaatccatgacgacgcaaaaaacgagcccatttatcgttcagcaagatgccgttggtttgcaggctgttggcgatgattttgttaccacggtaacgctgctggagctcgaccacctttgcaaaaaaatccagcccgcataaggtaggctcaccgccctgccagcaaaactcgacgttttgcgagggggtcgatgaaatggtgttgtgaatgtacgcttccagcgtgaggtcgtccatggtggcataccctggacgcggaacctcgttttccagataaaaacaataccgacaggccagattgcatcgattgccgccgggttttgctacggtattaaaattagcgctcattctttgctatgctcgaacgttttcgatgaggaagagagtaaagctaattgtgttaccggaggtgtggctaatgttaccgatggcgactggctttattttttggatcattatgcaagcgaaaaatacaggcggtatcgttatttttcgcaggtgacagcatgccctgctattctcttaaaaatttcatcattgatttggtgaatgtattttcattaaaaatttatagtatgaataatgcctgccatatggctataagcgcaggcgtaaattatcaagggcgtagtgatccacgtttactcttcagcaaggttgtttttggctatcggttggtcaacggccgctgccgggtattctacattacgttcatcctgcgccttacccgcctcgcgcaccatcgccagcgccagtccggcaacgatcaacgttaacccggtggacacccacattccgccgataatgcccagccggtggttcagccatgcgtaggcaaagggtgaaacagctgccatcagttgcccggggatcagcaggagacccgtgcggctggcgtagctttctgcgctaaacagcgccagcggcagcgtcgctttgacaatcgtcaccagcccgttaatcgcgccatagcccagcacaaacccggctgcgcatccggcataggtcgtgctgctcaatccaaggagaaaacagagcggcatgacgagcgcagtaaaacgcgttagcgtgagtgaggtgacccggggaccggccagcacttcccccagccgggcgccggtctggccgaatccccacagcataccgacggcaaccggcagaccaaagtggctgataaactccggcagatgggtagaggtaccgttagagatgaaggtgatcagcgcaataaagatcgcgtaacgcgccccgttacgccggtcgccctctgctgtcgctggcgaggctggtgatttcgccgctgaactgagccgctggcgaggcagttgataactcagccatgcgctcagcaggccaaacagcgcatagatccgcagagcattctgccagggcatgatggttaataacgcctcgcccagcggccagaagagggcagaggccagaccgccagcgagagtgatatgagagatagttttccgcgcctgctgaccgtacagattcaccactgcggcgaacagcgcatcatacagtgagagccgcatgccgatgccggtcagcagccaggcgccgtaccagccggccagcgaagggcgccaggccatcatggcgcagctggcggctatcagtaaggtaccgctggtgaccaccagccttccgccaaagcgagccagcaacctggcaacgaacggggagacagcggccatcatcagcatcgcaagcgtcaggccgagatagatctgcggcaaggaccatcctttgtcggcggcgatagccccggcaaaggtgccgggcatataaaaagagatcccccagttgatgagttgctgaccgcccgcggtgaaggcaaggcgtcggggaatagcgtttatttccatggtttttcattccgttaagacagttgtcctgagcctacccggcaggctattgttctggcagagcggctaccttatgcgcggtataagagaaacttttatgacaacactgaacctgggaaatctggcgaccttccggctggtcgtacagcgcggcagcttttctgccgccgccgacgcgctggggatctcccaacctgccgtcagcctgcaggtacgtcagctggagcagtttttacagaccaggctgctggagcgaaccggacgtgggatcaaggcgacggcggcgggaatggcattgctggcccacagcgagcagatcgatcgggcggtgaatagcgcggtgcagtcggtcagcgcattcagtcaggaggttaatggatcgttgacgctggggactggcgcgacggcctgcattcatcttcttccaccgctgctgcagcatcttcgtcagcagcacccgctgctgacggtgggggtgaccaccggcaacacgctggatatcgtccgcgcggtggaagaaaaccggctcgatctcgggctggtcacgctgcccgtgcaggggcgcagtctggcggtgactgcgatgttagatgaggagttcgtgaccatctatgccagccgcgagacggagatgccggcggtttatactcccgccgagctgcaggcgcagccgctcattgccttcgaggcgggtagcggcacgcgggatctgattgaccgctggttccgctcggcgggactggcggtgacgccggtaatgcagttggggagcatcgaggcgattaagcgcatggtgcgggcagggctgggctacagcatcgtgccccgcatggcggtggagcgggtggaggatcgcgacggattacgcgtacactcgctggcgccgcggctataccgacagctggcggtagtcatgcgtcaggacaaaattgtgacaaaaggtatcgctgaaatgctgcgcctgctgcataccgtgcgcttataaatcgccgacggcaaaattaccgcatcaaagacagtacttcagcagcgagcggctctgcctgcggagtgtggcgcttgcagtattagaatcaaaagattactcgcggggggagggttcgacggtgagcgatgactcctgcgacgcttttttatcctgatgatggtaccaggcgccgatggaggagtagacaaagcgtccaaagaagaagagaaagctgataagcagtacgatacgggtcatgcgacggttaaatcgatgtcgtttacgcatactgggtgcctgactcacaaaaggatccttgaagtatacccgaagatgggcgatgggggtattaaggcacaggaacgagatggggtcaattgatgcagatgtaaaagtgcggcagtgaaaacattaattaatgttatataagataatcgtcgtatttacatgctcactttattagccgtgaaatgtcgggaaaaataagatttattaatgttggtgtcagcatttgttgatttatatcaatagtctccttctcttggccactaaaatcagcggacgttaccgtgtcgttattatttacgcggtcagcatgggtggttggatgcctgcctgaatatgcctcgcgggagcagaggcactctgtagagcacctatgaatttattaaaatactatcaacaatatcgcgacaagtggtgggctttaccgctcgttctgcctgcgctgttattaccggtcgccagatgggcgaatacctacaccatgctcaatggtcatatggtatttttgtattatcttcccctggcgctggtgctcagcctgatgatgttttttggttgggcggcgatccctggcattattattggcctgctgttaactctggcccacggcatgatgcttgagcaatccatcggtgtactgttccatttccttatcccctgcgtgctctgctggggcggctaccgcatttttgtcccccagcgtcagcaggtctcacacggcaacgtccgactgatgccgcatcgtctgttctggcaaatgctgctcccctcggtcatttttctgattttgtcacagattgccgaatatcttggactccatccgcgcacaacggaaatgaccggcgttacgccatttagtttacgttcattaatcacctttcaggcgctaatggtagggtgcctgaccggcatgccgctgtgttattttgtgttacgggtcattcgtaatccttttcatttacgcggctttatttctcaggttcgcttacaaattgatccaaaaataaaaaaaattgaaattatttgctgggcgacggtattaattctgctactgtggctattattgatgccgcttaatgatagcagcaccatatttagtacgaattatacgttgtcattgctgatgccggtgatgctctggggtgccatgcgttttggctatcgctttatctcactgatctggacgccggtgctgattgccgtgatccattttcattaccgttacttaccaatttacccaagctataacacccagttggcgatcacgtcatcaagctatctggtattctcgtttattgtcgcctatacggcgatgctggcgacacagcagcggctgatctacgctcgcgtccggcagatggccttcctcgacccggtggttcatatgccgaacttgcgggcgctgagccgggcgctcaacggcacgagctggtcgacgctctgttttctgcgcattcctgagcttgaactgctggggcgccactatggggtacttttgcgaatccagtataagcaaatgctggcgaaccacctgagaacgctgctgcagcccaacgaagcggtatatcatcttgccggtcacgatttagtgttccgtctcaatagcgaagggcaccaggcgcgcattcacttaattgaccgctccctgcgacagttccgtttccactgggacggggtccccctgcagccgcggatcggcatgagctattgcagcgttcgctcgccggtcaagcatctgtatttactgcttggcgagttgaacaccattgccgacatgtcgttagccagcggccatccggaaaatttacagcgccgcggcgcgggccatgttcagcaggatctgaaagataaagtcgtgatgatgaaccgcattctcaaagcgctggaacatgaccattttgtcctgatggcgcagcctatccagggcattcgcggcgatcgctatcatgaagtgctggtgaggatggaaggggagtcgggtgagctaacggggccaaacgagttcttgccggtggcgcacgagtttgggctgtccacgcgggtggaccagtgggttattgagcatacgctggcctttatggacgccaaccggcgggcgctgcccggtctgcggctggcgatcaatctttctccggtgtcgctgagccgcagccagtttcctcaggaggtcgaagcgctgctgcaggcctacaacattgagccatggcagattattttcgagctgaccgagaactacgcgctcagcaatcccgagctggtctgccagactttagaacatctgcgggcgctgggctgccgggtggcgatcgatgattttggtaccggctacgccagctacgcccggttaaaaacaatgaacgtcgacattcttaaaatcgacggcagttttattcgcaatctgcttgccagcagtcttgattaccaggtcgtggactctatttgtcgtctggcacgtatgaagaacatgcaggtggtggccgaatatgtggagtcgccggaaatacgtcaggcggtcatcacgctggggatcgattatatgcagggctatgatatcggggtaccggtacctctgacgcagttggcggaggagatgaccggctgagcagcaaaaagccgggcgtaagcgcccggctcggttgatagccagagatacgatcaggcgtctggctcttcttcagcaatcttcagcatccactccggcacgccttcccagtactgttgctctttttccagatccagcagcaccagcgcattctggctaaaccagttgtgcggaaacgtcagcgtccagtggtgagcttccgtctgcaggcgcagcgtcggcggcgtagtggtagcctgacgctggttattcagcagtacgcccaggcgcagtagctgaattagcggcagaaactgctttttcctgaatagcgtaaagcgcggcagatcgtcgagcttgatcgctttgcgatgatagcgtacgagggtggccatcagcatctgctgctcctgattgaagcccggcaggtcgctattttggagaatgtaggccgagtgacgatgcatgccgctgtggttgatattcagccctacctcatggagcatcaccgcccatttcaacagcgccgcgaggtgcggattggccagcttgggattctgctcctgccactgctccagcatctgggtggtagtttccagtacccggcgcgcctgttcgcgatcgatgttgtactgatttgccagactctgtgccgtgcggctacgaatatcctggtggcggaagcggccttccatctcgtacaggacaccttcgcgcagcgcgccatcggacagacgaagttctttgatggccagcgcgtcaaacacaccgcagaggatcgccagcccaggcgcaaagaccgctttacggtcttctgagagaccgggcagactgagcgcgtcgaagtttttatgcttcaacagctcatttaccagcatctcgaggcgctccggcgtaataaatccgtccttctcgcccatcgccaccagcacttcctgggcggctttaatggtgccggaggcgcccagcgccacggtccatccctgaatacggaactgccaggccagcgtctccagcttctgcaccgccgccaggcgcgcgcgctggaagttttctttattgataacgccgccagggaaataggcctgcgagaagctcacgcagcccatgcggcggctttccaccaggcggggctcaaaatcttcgccaatgaccagctcggttgagccgccgccgatatcaatcaccagcttgcggccgcgctccggctgcgtgtgctcaacgcccataaaaatcaggcgtgcttcttcattaccggagatgatctcgattgggtaggggatcactttttccgcgcgtttaagaaactccgccgcgttggtcgcctgacgcagcgtatgcgtcccgacgatacagacgctggagggggagaacccctgcaggcgttcggcaaacagcgacaggcagttcagcccacgggtcatggcttcttcgctcaacaccgagttttcatcgaggccatcggccagatgtacgcgctgtttcaggcgtccgatgatctgcatggcgccgtcgacgacacgggcgatcaccatatgaaaactgttcgaaccaaggtcaaccgcagcgaactcctgcggccgaggggtgttatcgtttattggcataggttagtcgggttgttcgagtgatttgagataatcgtaaatcgccatttgcgcgcgcactttacggcgattgccgcgcggcacatagcggttactcagttctttatcaagatagcgcgcttttaccgtatcgttgaacaggatatcaaaaatatccagcacccgctgcttcagacgcggatcgagcagcggagcggcaacttcgatgcgataatcgatgttacgcgtcatccagtcggcagaggagagccagacctgtttatcgccaccgttttcaaaacagtagacccggtcgtgctcgaggaaacggtccacaatactgatgacgcggatattttcgctgataccttccagacccgggatcagcgagcacatgccgcggatcagcagattaaccggcacgccggagctggaggcggcatacagtcggtccaccagacctttatccaccagattgttcagcttcagcgtaatcccggacggttgcccgttttgcgcattggcgatctcgcgatcgatcatctcatacagcagacgacgcgagttctgcggcgacaccaacaggtagtcgaagctaaccggacgataggggttctcgataaagttaaacacccggcggacttcattggtaatgcgcgcatcggcggttaacagcgaatagtcggtgtagatccgcgccgtcttctcgttaaagttaccggtgccgatgtgggcgtagcgcaccacctcatcgccttctttacgcgagataaggaacagcttggcgtggatcttcagacctggcgcagagaagataacgtggactcccgcttccgtcaggcgtttcgcccagtgaatgttagcctcttcatcgaagcgcgcctgcagctccaccactacggtgactttcttaccgttgtgggcggcgtggatcatcgcgtcaataatgcgcgaatccttggccacgcggtaaatgttgattttgatcgccaatacgctggggtcgaaggaggcctgacgcagcagctccagcacgtgctcaaaggtgtgatagggatagtagagcagcacgtcgcgttcgcgaatggcgtcgaagccgttgcggaatttatcaaaccacagatgacgcaggcgcggcatgggtttattgaccagattggccttaccgacgttcgggaagccgataaagtctttaaagttgtgatagcggccgcccggcagcattgagtcatagttggaaatggagagcttatcgcgcagcatttcgaccatcgcatccggcatatcgcgctggtagacgaagcgaaccggctcggcggtcaggcgctgcttgaggctggaggacatcagctccatcaggctcgactccatctcatgcaccagatcgtactcggcgtcacgggtcatcttcatcgagtaggcgttcagcgcatcgtaatcaaagaagcctttaaaaatatcgtccaggcaatagcgcaggatgttatccaggaggatcattggcttgcggcgacgcggcgcttccggcggcaggttcacgaagcgcggcactttatccgacggtatttccagcagagcatagttgatgttttccccgcggataatctccaccgccagataggtgtaatcatctttcaggaactgcacgaggtccgtttcgcggttgatcaggatcggcgagatatgctggcgtaaatactgcttgaagtagttgcgcagccaggcctgctgattgacggacagctggcgctcgttgatcaggaagatctggttacgcgccatctccagcaacagttcattatacagactatcgaattcctgatcggccttcagaacgcgggcctgaattttgcctaacaggtggcgagaatgggcggtactgccttgttcttcactgataataatccggcgcttcagctcagcgaagcgcactttgtaaaactcatccaggttgttggagtaaatccctaagaagcgcatgcgctcaatcagcgggttactcttgtccgccgcttcctgcagcacgcgttcgttaaaagacaaccagctgagttctttttcgatgtatagcttttcctggcccattaccgctcacactccgttttactcacaggacgtagactattatgacgaatttttctgcgtagcgatttactgtgtcacaacaatatgacagtaagaagaattatttctgtgagatgtttgattagtaaacacttttaattaaaaaaaagccccgcgatgtgctcatgcggggctggttgttcattcgtcggcggcatagccctgcgggggaagctgtcgctcatccagccaggcgtggttgcctgccatgcgcagacgtccatcgacgaaccagctgatgaccagcggataaatggcatgttcctgggcctgaacccgcgccgtgatttcctcctcgctgtcgccagtgaagaccggcaccttggcctgcaggataaccggcccaccgtccagctcatcggtgacgaagtgcaccgaggtaccgtgctcctcgtcaccgttctccagcacctgacgatgagtatgcaggccaggatacttcggcagtagcgagggatggatgttcagcagacgtccctgatagtggctgacgaacgccgggctaaggatacgcatatagcctgccagcaccaccagatccggggcgtaggcgtcgatttcatgcatcagctgacgatcgaacgcttcccggtcggcaaactgactttgcgccagcgcatgggccgggatgccggccaggcgcgcgcgctcaaggccgaacgcatcagccttgttactgaataccgcacgcagggtgccgtttatctgtttccggccgcaggcgtcgatgatcgcctgcaaattgctgccgctaccggaaatcagcaccacgatgtttttcatgcaatgaccacacgctgttcggaatcggaggctttgatatacccgattttccacgcgttttcacctttgtcattcagcagggcaatcgctttgtccgcttccgctgccggcagggcgataatcatccctacgccgcagttaaaggtacggtacatttcatgctggctgacgttaccggcggtttgcagccagttgaagacggatggccactgccaggaggactcatcgatgatcgcctgggtgttatccggcagcacgcgcggaatgttttcccagaagccgccgccggtcaggtgagcaatagcgtggacgtcaacgctggcgatcagatcaagcaccgatttcacatagatgcgggttggcgccagcagatggtcggccagcggtttaccgtcaaggtcggtagtttgtgggtcaacgccgctaacctcaatgatcttacgcaccagcgaatagccgttagagtgcgggccgctggacgccagcgccaccagcacgtcgccatcggtcactttgctgccgtcgatgatttctgatttttccactaccccgacgcagaaacccgccacgtcgtaatcttcgccgtggtacatcccgggcatctctgcggtttcaccaccgaccagcgcgcaaccggactgcaggcagccttcggcgatgccgttgatgacgctggctgcggtatcgacgtccagtttaccggtggcgtaataatccaggaaaaacagcggctcagcgccctgaaccaccaggtcgttcacgcacatggcgaccaggtcgataccgatggtgtcgtgacgcttcagatccattgccagacgcagcttggtaccgacgccgtcggtgccggagaccagtaccggctcgcggtatttctgcggcagtgcgcacagcgcgccgaatccgcccagtccccccatcacttccgggcgacgggttttcttcaccacgcccttaatacggtcgacgagagcgttgcctgcatcaatatccacgccggcatctttatagctgagagaggttttatcggtcactgcgaagtctccacgcgtttgcggtaagcaagaaaaatcggcgcaattctaacagggaaagcaaacgtttgcgagcctgctttacagttggcgtaaaaccgctgatgaatggttaaatttgatactgctcacgaaaatgaaaccgggtacagtctggtgcttgcctctacgtaaaggaatcctcattatacgactgaaaccggtttccgtgttggtttgccacgcattttgtcggtgattgacgcgggtcaggagagggatgaatgaagattgcggcatttgatatcggtggcaccgcgttaaagatgggcgtgatggcccgcgacggcaggctgctggaaaccgccaggcagtcaatcaatgacagcgatggcgatcggatcttacaggcaatgctgtcgtggctggcggcccatccgtcgtgtgaaggaatagccatcagcgcgccgggctatatcgatccgcacagcggttttatcaccatgggcggcgctatccgtcgatttgataacttcgccatgaaatcgtggctcgagacgcgaaccgggctgccggtctcggtggaaaacgacgccaactgtgtgctgctggccgagcgctggcagggcaaagcggcggagatggccaattttctggtgctcactatcggtactggcatcggtggggcgattttctgccaacaccagctgatcaacggggcgcgttttcgtgccggcgaattcggctacatgcttaccgaccgtcccggcggacgcgatcctcgtcgctattcaatgaatgagaactgcactctgcgggtgctgcgccatcgctatgcgcaacatattggcgcgccgctggatagcgtgacaggcgaactgattttcgaccgctatgacgccggcgacccggtttgtcagcgtctggtcgccgagttcttcaatggcctgggccatggcctttataacctcgtccatatcttcgatccgcagaccatttttatcggtggcggcgttgtggaacgcccaggatttctgacgctactgcgccagcatctggcctggttcggcattgccgactatctcgataccgtcagtcacggtaacgatgccggcctgattggcgcggtttaccattttaatcagctgtatcgttcgccagacgacgatcgacattagggagagactatgtccggatttaaagcaggttttctgtggggcggcgcggtcgcagcgcatcagttagagggcggctggcaggagggcggcaaggggatcagcgtggcggatgtgatgaccgccggcgcccacggcgtgccgcgggaaattaccgacggcgtggtggccgggaaaaactacccgaaccatgaggcgatcgatttttatcatcgttatccacaggacctggcgctgtttgccgagatgggcttcaaatgttttcgcacctcgattgcttggacgcgtattttcccgcagggcgatgagctggagcccaacgaggctggcctgcagttttatgatgatctgttcgacgaatgcctgaaacacggcattgagccagtcattacgctgtcgcattttgaaatgccttatcacctggtcaccgagtacggcggctggcgcaaccgcaagctaatcgactttttcgtgcgctttgccagggtcgtcttcacccgctatcaacataaagtgaagtactggatgacctttaacgagatcaacaaccaggccaacttccatgaggactttgcccccttcaccaactccggtttgaaatatttgccggatgaagaccgggaaccggtgatgtaccaggccgcgcactatgagctggtggccagcgccctggcggtgaaagcggcgcgcgagatcaacccggcgctgcagattggctgcatgatcgctatgtgccccatctatccgctgacctgcgccccggacgatatgatgatggcgatgaacgccatgcaccgccgttactggtttaccgacgtccacgtgcgcggtcgctatccgcagcatctgctcaactattttgcccgccgcggctttactctggatatcaccgaagccgatcgtcaggcgttaaccgagggctgtgtcgactacattggctttagctactatatgtcgttcgctaccaaagccaccgaagacaaccccttgcttgattatgatgaaaccaccagcctggtctccaacccgtacgtcaaaaagtcggactggggctggcagattgacccggtcggcctgcgctattcgctgaactggttctgggatcactaccagctgccgctgtttattgtcgaaaacggctttggcgcgattgatgtccgcgaagcggacggcagcgtcaatgaccagtatcgtatcgattatctctccgcccatatcgcggagatgaaaaaggcggtggtcgaggatggcgtcgatctgatgggctacaccccctggggctgtatcgatctggtttccgccggcacgggggaaatgaaaaaacgctacggctttatttatgtcgataaagataatgaaggcaatggcacgttggcacgcagccggaaaaagtcctttgcctggtatcagcaggtaattgccagcaacggggagaacctgtcgtagtcgggtggcgctaacgcttaaccgacctacaatacacgtaggcccgcgtaagcgtatggactgcaccccgcacccaagccggagcctcgcctccggtttttttgtctctaaatcactttgcttgatatacgtcaagcaagatgggtatggcacaatccgcaaaaagcggtataatcccgcgattttttttgtggctgcccctcagaggagaaagagaatgaagattgtggaagtcaaacacccactcgtcaaacacaagctgggcctgatgcgcgagcacgacatcagcaccaaacgcttccgtgaactcgcctcagaagtgggcagcttactgacttatgaagccaccgccgatctggagactgagaaagtcactattgaaggctggaacggtccggtggaagtcgagcagatcaagggcaagaaaattaccgttgtgcctatcctgcgcgctggcctcggcatgatggaaggggtgctggagcacgtgccaagcgcgcgtatcagcgtggtcggtatctatcgcaatgaagaaaccctcgagccggtgccttacttccagaaactggtgtctaacatcgatgaacgtatggcgctggtcgttgacccgatgctggccaccggtgggtcgatgatcgccactatcgatctgctgaaaaacgccggctgcaccagcatcaaggtgctggtgctggtggcggcgccggaagggattgccgcgctggagaaagcccacccggacgttgagctgtacaccgcctctgtcgataagggactgaacgagcacgggtatatcattcccggtctcggcgatgccggcgacaagatttttggaacgaaataaaatataccgcgaaaaaagccgactttgagagtcggcttttttttgaataaaagtaatccacagcaaataacagacgactctcagaggaatacactatgacgcgccgtgccatcggggtgagtgaaagaccgccgcttttacagacaatcccgcttagtttgcaacatctgttcgccatgtttggcgcaacggtactggtgcctattctgttccacattaacccggccaccgtcctgctgttcaacggcatcggtacgctgttgtacctctttatctgtaaaggcaaaattcccgcttatctgggatcaagcttcgcttttatctccccggtgctgctgctgttgccgctgggctacgaagtggcgctgggcggctttattatgtgcggcgtgctgttctgcctcgtctcctttattgtcaaaaaagccggtaccggctggctggatgtgatgttcccgccggcggcgatgggcgccatcgtggcggttatcggcctcgaactggcgggcgtggcggctaatatggccgggctgctgccggccgacggccagtcaccggacagtaaaaccattattatctcgatggtgaccctggcggtgacggtgttcggatccgtgctgttccgcggcttcctggcgattatcccgatcctgatcggcgtgctggtgggctatgcgctgtcgtttgtgatgggcgtggtcgataccaccccgatcgccgaggcgcactggttcgcgctgccgactttctacactccgcgctttgagtggtttgctatcttcaccatactgcccgccgcgctggtggtgattgccgagcacgtggggcatctggtggtgaccgccaatatcgttaagcgcgatctgatccgcgacccgggcctgcatcgttcgatgtttgccaacggcctgtcgacgatcgtttccggcttcttcggttcgacgcccaacactacctacggtgaaaatatcggcgtgatggcgattacccgggtctacagcacctgggtaatcggcggcgcggcgatcattgcgattctgctctcctgcgtcggcaaactggcggcggctatccagatcatcccggtgccggtgatgggcggcgtttccctgctgctgtacggggtgatcggcgcctcggggatccgcgtactgattgaatcgaaggtggattacagtaaagcgcagaatctgatcctcacctccgtgatcctgatcatcggcgttagcggcgctaaagtgcacattggcgccgccgagctgaaagggatggcgctggcgactatcgtgggcatcgccctcagcctgattttcaagcttatcagcgtcctgcgtccggaagaggtggtcctcgacgcggcggatagcgaagagtttaaataacgatcgcctgaccgggcggcgatcccgcccggttctctcctgacctaaatctgtggtaaactcttcgcgtttttctgtaagcctatgttgaggtccatctgaacgcaccggcacagctctctttgccactgtatcttcctgacgacgaaaccttcgcgagtttctggccgggtgataatccttccctacttgccgccctccagaacgtactgcgccaggaacacagcgggtacatttatatctggtcacgtgaaggggcaggtcgtagccacctgttacacgccgcctgcgcggagctttcccagcgcggggatgcggtaggctacgtgccgctggataaacggacgtggtttgtgcccgaggtgctggaggggatggaacagctggcgctggtgtgcatcgataacatcgagtgcgtcgccggcgatgagccctgggagatggccatctttaatctctataaccggatcctggaatcaggcaaaacccggctgctgatcaccggcgatcggccgccgcggcagctgaatcttggcctgccggatctggcctcacggctggactgggggcagatctataagctgcagccgctgtcggatgaagacaaactgcaggcgctgcagctgcgcgccagactgcgcggcttcgagatgccggaagatgtgtgccgcttcctgctgaagcggctggatcgcgagatgcgttcgctgtttatgaccctcgatcagctggatcatgcctcgattaccgctcagcgcaaactgacgatccccttcgtgaaagagatccttaagctttagtccgccaggggagtcagctcctgctccgtcagcccggtcaaccgggcgaccaggtcgcgcggaaggccgctgtgcagcatagcgacagcgatgcgctgcgcctcttctttccgtccttcctgacggccttgcgccaggccccgctccagcccctgttgttccagatattccgcaatcgtcatcaacgtctccttatgctgcggcgtacgtaacgccagctcgcgaatgaatttaatcggctcgcgcgtgttgcctgactgtaccagatagtgcatcagggcttgtacctgcgattccgtcgccagtccagtcaataataattcgctcagcttgtcgaggagctgcgccagatcgcgttgtcgaatatgtttttgcagtaactccagcgttgccatgcgctggtgggtggcaatctcgtcatccggaatgacggttatgtccgccagcggaaacgccccgtgataaaggtggccggccagctccggagcgacgaattcatcgagccagcgcagagagaacggataggggctcaccagaccgtggtagaagagaacagggatcaccagcggcaggcgatcgtggccggcatcgagatggcgctgcatggcggcgatggcgtagcgcatcagacgaaaggccatatgccggtcgggcgtgctctggtgttcgataagcgcataaatataaccgtcgcccgccgtggttttcagggaatacaaaatgtcggcgtaaaagggacgcagatcgtcttcgacaaaatgcccggactcgagatgcagcgtacgcagatcgcacactttaagcagcgtctcgggcagatacagctgcaggaaatcacgggcggtatcgggatgggagaggtaggtcttaaacacggcgtcatggggcgtggaggtcggctttttcatgttcatccgtccagtggattgagcgatggatgaacagtagcaccgtccggcgggcgggagatattggcgtgaaagatctggaatcgcccacgtaaaaaaaagcgccgcgcaagcgcggcgcgggtgagttagcttacgatctcaagaacctgttccggcgggcggccaatacgcgcctggccgcggctgacgacgatagggcgctcgatgagtttcggattgtcgaccatcgcctgtatcagcgccgcgttgctgagagccgggtcggccagattgagcgatttatacagatcctctttctggcgcatgagctcgcgggggctctccatacccagcagctgcagcagctggcgcagcgtcccggcatccggtggcgtctcaagataaagcaccacctcaggatcgatgccgcggctctgcagcaggctcagcgtttcgcggctcttggagcagcgtgggttatggtaaatttttaccgcgtcggtcatggggtctccttacattttttgatagggacggaagcgagcctgcagatcgcgtagctgatcgatacgggcatcgtaacgtgcctgctgcaggctaccgagtttcacctgcgagctggcgctgctgagcagggaaatcgcctgctccagctggccgaccagcgccatgctttcagcccgcgccgccagctcctgatcgcgattgcccagcgcgccttccgcctgggccagcaggtcccagccgttgccatcctctttataggtaaaggtataccggttcagaatggtcgccgcttccccgggctgcccgccctgcagcagggcgttggccaggttcaactgcagcaccggattagtacgtagctcgcgggcgtttttaaggcgattgatggcgtcgctggttttcttctgtccgaggtcgatatcggtggccagatcgagataccaggcattttgcgggtcggcgttgagcagcggctgcagcgttttgcgtgcctggtcaaagttattgctttccatcgccagcagagcgcgaccatactgggcggcatgctgttggcggatattgcctttatcccaggcgttcagcagatcggtgcccagcttgttgtcgccgttggtgtacatcccgagggtacgcgccttcgccagatagaagtccgccgaggactgtaccaccaccgggcgcatctggttggcgcggttacgggcatcggccagtcggctttccggcagggggtgggtgagcaacatttccggcggtcgcgtcgagtagcgcgactcgtcaagcagtttacccataaacatcggcatggcctgtgggtcgaaacccgagcgctgcagaacctgaatgccaatccggtcggcctcttcttcgttctggcgggtgaagctgatcataccctgctgggtgccggccagcgtcccggtcagggccgccattccggcctgcgggctggccatcgccagcagaatcgaacccagggcaccgacccaggtcagcggcgcattgcgcttctgatcttccatcgcgcgggcgagatgccgctgcgtcacgtgggagatttcgtgcgccatgacagaggccagttcgctctcgttatcagagtagcggaacagggcggagtggaggaccacattgccgccgaagaaggcgaaggcgttgatctggtcgttattaatcaaatagaagtggaacggggtacgcaccgagttggcgtgagccaccagacgcatacccagcccgttgatatattgcaccagcagagggtcgttgatcagcggcgcgctaccgcgcagttggcggacgtagtaatcccccatctgcatttcctgaccgattgacagagtgcttcctgcggaggttcccatgtccggcagggtatctgcggagtcagcaaaagcaggacctatcgaacccagcgtcagcgacgcgatcgcggtcgccaccagcgttttcttcaactgcctgaacataacctctgtcctgtaatgtgggtgtgccagtttgaccgattgtgcggcgtaatgttccctggccgcatcccagcgagtttagctggcgttggccgccttgaaaatatgttcttcatggcggagaacggtttgactgcggcgcatcaaaaagcgaagtcttttttgtgacatttcgatacaattccctggattgtcgccgcttggcccttcagggaaggttttatgcttgagatgttaatgcagtggtaccgccgtcgattcagcgaccctgaggcgatagcgctgctggttattttgcttgccggtttcggcattatgttctttttcagcggcctgctggccccgttgctggtggctatcgtgctggcctatctgctggagtggccgaccgttcgtctggagcgcatcggtctgtcgcgcacctgggccacctcgctggtgctgatcctctttgtgggcatcctgctgttgctggcctttgtggtgctgccggtagcctggcagcaggggatctacctcatccgcgatatgccgggcatgctaaataagctctctgatttcgccgccacgctgccgcggcgctatccggcgttaatggatgccggcattatcgatgcgatggcggaaaatatgcgcacccggatgctgacggtgggcgactcggtggttaagtactctctggcctcgctggtggggctactcaccctggcggtctatctggtgctggtgccgctgatggtcttcttcctgctgaaggataaagagcagatgctcaacgcggtgcgccgcgttctgccgcgcaatcgcgggcttgccgggcaggtgtggaaagagatgaaccagcagatcaccaactacattcgcggcaaggtgctggagatgattgtcgtcagcgtcgccacctggataggctttattctctttggcctcaactactcgttgctgctggcggtgctggtgggcttctcggtgctgatcccctatatcggcgcgtttgtggtgaccattccggtggtgggggtggcgctgtttcagtttggcgctggcaccgagttctggagcctgtttgcggtctatctgattattcaggggctggacggtaacctgctggttccggtgctgttctcggaagcggtcaatttacacccgctggtgattatcctgtcggtggtgatctttggcggactgtggggattctggggcgtcttcttcgccattccgctggccacgctgattaaagctgtggtgcatgcctggccggatggtttggcggtcgacgactaaggcaatgagaataaaaaaagacgccgggcgagggcttcctctcccggcgtcttgctttgcatcaggcgttttctttcagccagttcagcaccacgtcgtggtgattgctggttttgaaatcatcaaagacgtgttcgattttgccatcggcatcgatgaggaaactaatccggtggatcccgtcgtaggttttccccataaaggatttttcgccccagacgccaaactgctcgcaaacctgatggttttcatcagacagcagcgtaaagttcagcagctctttttcggcgaaacgggagagtttttccggtttatcggtgctgatgcccagcacttcaacgccggcttttttcaggtcgtccatattatcgcgcaagccgcacgcctgtacggtgcagcccggggtcatggctttcgggtaaaaataaaccaggacacgttgtccctggaagtcggttaaatttacttcctcgccgtcctggtccggtaagctaaatttcggtgcgatatcaccggctttcagtggggtcatgggttaaactccatcctgttcatcatgctgtgaataattaacgatgttaatactgccttgtgcgttcagttctgtacatagggctttgaacgcttgttcgatatttgctgcattttgcgtcgcaggactgtgggcagttatctggataaaaagctgcgcggaatcgccgtctcccggctgcgtgcgggacaccagctccgcaatattcatattccatgtatcgcacagggcagtaaagcgctcgatgatatgcggtgagtccggcacctcaacctggacccaaacggtgtttggcatggcctgcggcgggcgcgcagtggtgcgtttcatcacgatcaacagctccagctccgcgcctttcagcggcagagttgattcgatcaggttaatcgcattccacgacccggaaagcagcatgataaacgtaaactcatcaccgagcatggccagccggctgtcttcgatattacaaccgcagctgctgacgtggcgagtgatcgtattcacgatgccgggacggtcagcccccagggcggtaataaccagatagtgttgtaatgaggctgtcaaacctgttcttcctttaaaaaggtgaggtaacattaggaaagcataaaaaaaaccgccatacaacatccctgatggcgtcgggtctcttgcttttattacagctccaaacgtaacattgagaatcttgtcgcacttctgctctgaggatggcccatgttcacgggaagtattgtagcgcttgtcacgccgatggatgaaaacggtaatgtctgccggacaagcctgaaaaaactgattgattaccatgtcgccaacggaacctcggcgatcgtttcggtagggactaccggtgaatccgcaacgctgagccatgaagagcatggcgacgtggtgatgatgacgctggagctggccgacgggcgtattccggttatcgctggaacgggagccaatgcaaccgcagaggcgattagcctgaccaaacgttttaacgacagcggtgttgttggctgcctgacggtcactccttattataaccgtccgacccaggaaggcctgttccagcactttaaagctatcgccgaacatactgacctgccgcaaattctgtataatgtgccgtcccgtaccggttgcgatatgctgccggaaaccgttggccgtctggcggaaattaaaaatattgtcggtattaaggaagcaacagggaacttaagtcgcgttcaccagatcaaagagctggtttcagacgactttattctgctgagcggtgacgatgcgaccggtatggacttcatgcagctcggcggcgtaggcgtgatttctgttacggccaacgtggcggcgcgcgaaatggccgacatgtgccgtctggcgctggcgggtcaatttgccgaagctcgtgcgattaaccagcgtctgatgccactgcatacaaaattatttgtcgaacccaatcctatcccggtgaaatggggatgcaaggcgttgggtcttgtggcgaccgatacgctgcgcttgccgatgacgcctatcaccgatcatggtcgtgaagccgtcactgccgcgctgaagcatgccggtttgctgtaaagtttagggagatttgatggcttactcagtacagaagtcgcgcctggcgaaggttgcgggtgtttcgctggttctactcctcgcggcctgtagttctgactcgcgctataagcgtcaggtgagcggtgatgaggcctatttacaggcatcaccgttgagcgaacttcatgcgccggcggggatgatcctgccgattcaggtgggtgattacaatattccggtggctaacagcaccggcgcggtcggtaaagcgctggacattcgtccgccggcgcagccgctggcgctggtgagcggtgcgcggacccagtttaacggcgataccgcgacgctgatggtcgagaacggccgcagcggttcgctgtgggcacaggtcaccagtattcttcaggcgaagaactacgttatcgccaagcgcgatgatgcgagccagacgctgaacaccgactgggttgagtggaaccgtcttgatgaagatcagcagtatcgcggtcgttatcaaatctccgtcaaaccgcagggttatcagcaagcggtggtcgttaagctggtgaatctggagcaggcgggtaaaccggttgccgatccggcatctctgcagcgctacagcaccgctatgctgaacgtcatttcggaaggccttgacatgaatgccaccagcgcccagaacgccgcacagcgcagcgcgggggccaccttcgacgtgcagagcgccgccgacgataccggcctgccgatgctcgtagttcgcgcgccgtttaacctggtgtggcagcgtctgcctggcgccctcgagaaagtggggatgaaagtgaccgacagcacgcgctctcagggcagcatggcgctgacctataagccgctgtctgacagcagctggcaggagctgggcgcacgtgacccgcagctggtctccggcgactacaaactgcaggtcggcgacctcgataaccgcagtagcctgcagtttatcgacccgaaaggccacaccctgacgcagtcgcaaaatgacgccctggtagccgtattccaggccgcatttaacaagtaatcaaaagggctggagcaatccggccctttttcatgtatagtgacgcaaacgtgtgcgtggccatataatcctgtaaatcgccgcgttaaggctgctccagtcgcctgactgcagttcgccccgcaagcgtacagcatccgctccaacgcccgttgcaggatgttatgtaagaccgacacgtcattttttggctcaatatcactggagtagtgaaagatgaaaaagcaagctgagttgtatcgtggtaaggcgaagacagtatacagcaccgataatccggacctgctggtactggaattccgtaacgatacgtcagcaggtgatggcgcgcgcatcgagcagttcgatcgtaaaggcatggtgaacaacaaattcaaccatttcattatgagtaaactggcagaagcgggcatccctacccagatggaagcgctgctctccgataccgaatgtctggtgaaaaaactggatatggtgccggtagagtgcgtggtgcgtaaccgtgcggcaggctcgctggtaaaacgtttaggcattgaagaaggtatcgagctgaatccgccgctgttcgacctgttcctgaaaaacgatgctatgcacgatccgatggtcaacgactcctactgcgaaaccttcggctgggtgagtaaagagaatctggcgcggatgcgcgagctgacctacaaagccaacgacgtgctgaaaaaactgttcgatgacgccggtctgattctggtggactttaagctggagtttggtctgttcaaaggcgaagtggtgctgggcgacgagttttcgccggacggcagccgcctgtgggataaaaacaccctcgataaaatggacaaagaccgcttccgccagagccttggcggcctgatcgaagcctacgaagaagtggctcaccgcctgggcgttaagctcgactaacccgcccgccgccagaagatggcctcatcttctggcgtctcttgctgtttcctgtggtaatcctgcgctgaaccgcctacgatctctgctattgatacataacagggaatgaggtgcttatgcgctggcaagggcgtcgcgaaagcgacaatgttgaagatcgacgtggacaatcaggctcgccgtttggcggcggcgggggcggcggcttccgtctgccgagcgggaagggcggcattgtactgctgattattgtgctggtggcgggctactacggcgtggatttgaccggcatgttgaccggcgaaccgatgccgcagcagcagacctccacgcagcgctccatcagtccgaaagacgatgaagcggcgaagtttacttccgtcattctggctaccaccgaagatacctgggggccgatctttgaaaagatgggccgccagtacccgcagccaaagctggtgctctaccgcggcgcgacccgtaccggctgcggcaccggtcagtcggtgatgggccccttctattgtcctgccgacagtacggtctatatcgacctgtcattctacgatgagatgaaaaataaactgggcgccgacggcaactttgcccaggggtacgtcattgctcatgaagtgggtcatcacgtacaaaaactgctgggcattgagccgaaggtccgccagcaacagcagcatgccacgcaggccgaagccaaccgcctgtcggttaagatggagctgcaggcagactgcttcgccggcgtctggggtcataatatgcagcagcaggatattctggaaactggcgatctgcaggaggcgctgaacgccgccgaggccatcggcgacgatcgtctacagcagcagagccagggacgcgtggtgccggacagttttacccacggcacctcgaaacagcgctacacctggttcaaacgcggtttcgatagcggcgatccggcgcagtgcaataccttcggcagcgcgctgtaatcgtcccccatgatggacgcgctgcttaacctcaccgcgcaaatggcgcgggaggggatccgtcgcctgctggtgctcagcggcgatgagagctggacgctgcagcaggcgcaggcgctacgggagaggctcggcggcgatggcctgtgggttggccccgagccggtttctgcgccctgcgtggcgcccggcgcgctgaaaacgctgctggggcgggaagtgatgcacgcctttttcgatgcccggcgcgggtttgatgtggccgccatggcggccctgagcggcacgctgcgggcgggaagctggctggtgctgctgacgccccccttcgccgactggccgacccgggcggatgaggactctctgcgctggagcgatacgcctgaccctatcgttacccctaactttgttcaccgctgctgtcggcagtttatcgccgatccggaggtgttgctctggcggcagtcggaccggccacgtttcccgctggccgccccgcgtccagactggcatcccgccgatggccgcccgcaggccgagcaggcggcaatccttgagcaactgatacgcctgccgcccggtatcgcggcggtgacggcggagcgtggacgggggaagtctgcgctggcgggcatgctcctgcgccagcttgggggcgaggccatcgtcaccgccccaacgcgtagcgctgtcgaggtgctggccagctttgccggggagacgttgcgctttatggcgcccgatgcgctgctggcgtcgaaagaaaaggcggcgtggctgatagtcgatgaggccgcggctatcccggctccgcttctccggcagctggtgagccgttttccccgcacgctactcaccacgacggtgcaagggtacgagggcaccggtcgcgggttcctgctgaaattttgcgccagtctgccccatctgcaatccttcaccctgagcgccccgatccgctgggcggcgggctgtccgctggagtcagccatcagtcagttgcttatctttaacgatgaggcatttcgcgacgcgccgatgggggagatagccctggaggcggtcaatcagtcctgctggcaaacgcagccagcgctaccggaggcgatgtaccagctattgtccggggcgcattaccgaacttccccgctcgatctgcggcgcatgatggatgctccgggccaggctttccgctgcgctcgcaccggcggcgcggtggcgggcgccctgtggctggtggccgaggggggactttctcgcgaactgagccgggcggtatgggcgggttttcgccggccgcgcgggaatctggtcgcccagtcgctggcggcgcacggcggcagtcccctggcggcgacgctgcgcgggctgcgggtcagtcggatcgctgtccatcccacccgccagcgggaaggcctggggcggaagatgatcgccgatatcgccgccgatgccgctggctatgactatctctccgtcagcttcggctataccgctgagctgtggcgcttctggcaacgctgcgggtttaccctcgtacggctgggtacccatcgcgaggccagcagcggctgctatacggcgatggccctctatccgttgaccgcggcagggcgccagctggcgcagcgggaggcgcagcggctgcagcgcgatgaatactggcttcgcccgtggcgagaggaatccgcgccgctgccggccgtcgcagacgctatgcttagtgatgaggactggctggaagcggcgagctttgccttcgcccaccgcccgctggccgcggcgctgggctgcctcaaccgcctactgatgcaggccgacatgccgttgccggccctgcggggacgactgcagggcaaagaggaggccgcactctgcgccgtgctgcagctgacggggcgtaaagccttgcaggcgagatggcgtcgggaggccgctgacgccttgcgcttccttgatgcagcgcgcgctgatgcgctgcgtcagcaggtggcgcatctgcaatttttttaactaactcattcagttaaatggcatggtcatatctggcgagcggcgtacactgcccgcaaacactaaggagacagccatgaaacacgatcattttattgttcaaagtcctgcgacgcctgcgcaacagctgttgctgctgtttcatggcgtaggggataacccggtctccatggggcaaatcggcagctggttcgcgccgcagtttcccgatgcgctgatcgtcagtatcggcggggtggaaccttgcggccccaacggtcggcagtggttttcactgcagggggtgacggaagagaatcgtcagcagcgcatcgacgccattatgccgacctttattgaaattgtacgctactggcaggaaaagagcggcgtcagtccacttgccaccgcgctgatcggtttctctcagggggcgattatgtcgctggagagtatcaaagcggcgccggatctggcttcgcgggtcatcgcctttaatggccgctatgcgacgctgccggagacggcaacgacggccactaccattcacctgatccacggtggtgaagatcgggttatcgacctggcgtgggcggtgtcggccgaggaggcgttacagcaggcgggcggcgacgtgaccttagatattgtcgacgatctcgggcatgccattgacgatcgcagtatgcagttggcgatcgagcgtctgcgttataccgtgccgaagcactattttgatgaggcgctgagcggcagtacgccaaaaggggatgatatcatcgaaatgctgtaaccccggagagcggggttacaggcgggcggtaccgcgataaaggcaaacttacggttttttcgactggtcgtgcttcggccagtcgtcgtcgtcgtcccatttatcgttaaaatcacggtgcggcggcagatcgggtttgttgttgaggaattttttgtggtcaacgcgatttagatctttaatcacgttgataattacccccaccaaaaagaccagcaccagaatccaccagtgtttaataagccattccatgcgcgcttcctctttacgtcaattcgtcaggcgaccagctgttccatgacgcgttgatacatccgcgccagcagctgcaggtcggcggcgttcacacattcattaattttgtgaatcgttgcgtttacggggcccagctcaaccacctgcgcccccatgcgcgcgataaaccgtccgtctgaggtgccgccgttggttaacagctgcggtttgatctcattatagtgctcaatcgcgttgacgaccgcatccaccagcttgccccgtccggtgaggaacggctggccggagagccaccactccacgctgtaacgcagctggtatttttccagcagggcgatcacccgggatttgatcatctcgtccgtcagctccgtactgaagcggaagttgaactggacgaacatatcgccggggatcacgttattgctgccggtgccggactgcacgttggcgatctgcatgctggtcggcgggaagaactcattgcctttatcccactcgatattgaccagttccgccagcatcggtgccgcgaggtggacagggttatcggcaaggtgcggataggcgacatgcccctgcacgccgtgaatagtcaggttgcaggtcagcgagccgcggcggccgtttttcaccacatcgccgaccacttcggtactggaaggttcgccgaccagacaatagtccagacgctcgttacgcgccatcagcgtctccaccactttgacggtgccgtttttggcgctggcctcttcatcagaggtgatcaaaaacgccagtcggcccctgtggttcgggtactgcgcgacaaaacgctctgcggcaaccaccatcgccgccagcgagcctttcatatccgccgctccgcggccaaacagcatcccgtcgcggatggtcggttcgaacgggggattgatccagcggtcggcgtcgcctgccgggactacgtcggtgtggccggcgaaggccagcgtctcgccgtggccgcgccaggcccagaaattctgcgtatcgccgaaatccatcggttcaacggtaaagccgatcgcacgcaggcgttcaatcattaacgcctggcatcccgcatcatcggggctaagggaagggcggcgaataagctgctgagccagctcaatgaccgggcaagacatagactatacctcgttaaactgctgataacttgcttcactaaaacccagcagcataggacgaccgggcgcgcagagcaatgggcgtttgataattgccggcatttccagcatcaatgcggctgcggcgtcggcattatcgatgctattgcgcagcgactcgtcaagtttgcgccaggtggtgccacgggtgttcagcagcgcctgccagcccagctcggcaataaaggtatccagttgcgcacgctcaaggccatcggcgcggtaatcatggaagcgatactcaatccgatgcgcttccagccagcggcgggcttttttaatggtatcgcagtttttaattccgtacatggtgagcatagataaaccttttacattcaattaagcggttaactcagatatttccgaatatataagtcttactgaaataatacgtgattcagatgaataaatataactttttaccggggatctcattcgatatatcgggtggttaaatgttggccacctgtgggcatgatgtgagggctttaacattattgcaaaaatgttgtctgaggttgctctacgtcacattatgtttacatacgaagcggcatagtagcgacaaccagaggttttatctctgtcagcggtccataagacaatcagagcaataggggagcacaacttcccatcggtaatgaagttatatagaatcgaccataataataagagaggctattatgattgaacatgaattggggaactggaaagactttattgaaggcatgcttcgtaaataaatttccgcaatgtgagcaggggaataacgcgaagtaaataagcgcgctagggttctgaacacataaagaaggcgaccaccgtggtcgccttttctgttattacgcctcgccgccgaagctcgtcggtttattgcggacgctcctttagcggaaaacggcgacgcaccagcacaaagaacagcggcacgaaaaagatcgccagcacggtggcggagatcatcccgcccatcactccggtgccgaccgcatgctggctgccggaaccggcgccggtgctggtcgccatcggcagcacgccgaagatgaacgccagcgaggtcatcaggatggggcgcaggcgctgacggcaagccgacagcgtggcgctgagcagatcctggcccttctcgttgagctcattggcgaactcgacgatcagaatggcgtttttcgccgacaggccgatcaccgtcaacagacccacctggaagtacacgtcattctccagcccgcgcatccaggtcgccagcagggcgccaatcacccccagcggcaccaccagcatcaccgagaacggcaccgaccagctctcgtacagcgccgccaggcacaggaacaccaccagcagagaaatcgcgtacagggccggcgcctgagcgccagagaggcgttcctggtaggacatggcggtccattcgaggccaaagccggtgggtaactgcgcggccagcttctccatcatgtccatcgcggtaccggtactgatacccggcgccgcctcaccgacgatctccaccgctgagtagccattgtagcgctccagccgcggcgagccggtctcccagcgcgaggtggcgaaggccgagaatggcaccatcgtgccgctgctattgcgcacgtaccaaagattgatatcgtcaggcagcatccggtatttcgccgccgcctggacgtagactttctttacccggccgcgatccataaagtcgttgacgtagctcgacccccacgcggtttgcagcgtatcgttgatgtcgtcaatggagacgcccagcgcctgcgctttacgctgatcgatatcgacctgcagctgcggactgtcatcgagcccgttatgccggacgcgggtcaacagcggatttttcccggccagctcaagtagcgtatcgcgcgccgccatcagcgcatcgtgccccttcccggcatgatcctccagctccatatcgaagcctgccgaactgccgaggccgctgatcgccggcgggctgctggcgataacccgcgcttcgttaatctgattaaacgctttggtggcgcgttcaataatggcaaaggaggtgccggtttgcgggtcgcgctggtcccagtctttgagacgaacgaacatacgggccacgttctgcccattgccgccggggccggagccaacggtagcgaacaccgactcgacgttctgcttctcgttattgaggaagtaatcttccgccttctgcaccaccttcagcgtctgctgctgggtgctgccgctcggcaactggaccgaggtggtgaacatcccgcgatcctccagcggcaggaacgaggtcggcaaatgcagaaacaggaacaccatcccgccgagcaggacgacgtagatcagcatccagcgcagcgagcggtgcagtattttgccgacgaaggtttcgtagcggctggcgctgcggttgaaggtgcggttgaaccagccgaagaagccttttctttcatgggattcacctggcttaacaggcttaagcagcgtggcgcaaagggcaggggtgaggatcatggccaccagcaccgagaggaccatcgccgcgacgatagtgattgagaactggcgatagatggcgccggtggtgccgccgaagaaggccatcggcacgaataccgccgacagcaccatcgcgatccccaccagcgcgccctgaatttgtcccatcgatttgcgggtcgcctcgcgtggcgacaggccctcctcgctcatgatgcgctcgacgttctccaccaccacgatggcgtcatccaccagcaggccgatcgccaacaccatcgcgaacatcgtcagggtgttgatgctgtagccacaggcatacagcaccgcgaaagtgcccatcagcaccaccggcacggcgatggtcgggatcagggtggcgcggaagttctgcaggaacagatacatcacgaggaagaccagcaggatcgcctccagcagggttttcaccacgtcggtgatggaagccttcacgaaggaggtggtctcgtaggcgaccttatattccagaccgtgggggaaaaactgcgccagctcattgaggcgattgatcacgcgctccgcggtggccatttcgttggcgccggaagccagcttgatcccgaggcctgaggccggctggcggttgtagcggctaagatagtcgtacttctccgcccccatttcgacggtggcgacatcgcccagcgtcacctctgaaccatcctgattgacgcgcagagtgatattgcggaactgctccggggtttgcagcagagattgcgagttgatggtggcgttcagcgcttgcttatcgaccgaaggcgtcccgccaagctggccaacggcaatctgggcgttctgcgaactgatggcgtcggtaacatccttggtggtcatctggtagctgttgagcttcgccgggtcgagccagatgcgcattgagtattgcgaaccgtaggcgtcgatatcccccacgccgttgacgcggctgagcgggtcctggatgttactggcgacgtagtcggcgatatcttgtttatccatactgccgtcagtggagacgaaggcgagcgtcaggatattggtatcaccggtcttgcgtaccgtcaccccttggttttgcaccgcctgcggcagcttacgcatcgccgactgtagctggttctgaacctgctgcacggcttcatccgggtcggtaccggcggtaaagctgagggtgatcgtcgcctggccggtggcgctgctctgggaggacatatacatcaggttatcgaggccggtcatattctgttcgataacctgagtgacggtattctccagggtttgcgcggaagcgccgggatagttggcggtgatccgcacattcggcggggcgaggtcgggatactgttcaaccggcagcgacaaaatggcaagggtgcccgtcaggcataacaggattgccagcacccatgcaaaaatggggcgatcgataaagaaattcgccatcagaataaaaacctcatatgcacattttcttgttattgcacagcctgtgccactttagcgccagcctctccggcaatcgtggagaaattaaggagatagtgtaatttatcatgttgcttttgccgtatcgtaaagaaacctcgagctttcctgccagcaggtagcgagtctgcttcgtcaccgcagaccggcgcattatcccttgccggtgtgaaacctcatttcatttaagtcaaaaaaattgatccaaaacggattctctccagaaaaagtttatcctgggcaattggacattgttccggcgtcatcttgtcgggtaataaataggcatgcgcattgaggggttattcaccaagaagacaaaaggaagccatgaaccactttattttgagcgatagccgaaagtgcatcggctgccaggcctgcgaagtggcctgcgtgatggcgcataacgaggagcaacacgtgctgaccccgcagcgctttttgccacgtatcaccgtgatcaaagcggagggccagcgtaacgccatcacctgccgccactgcgaggacgccccctgcgtccgcagttgtcccaacgacgccatcgcccagtccggcgacagcgttcaggtccgtcaggagaaatgcattggctgtaaatcctgcatggtggcctgcccgttcggggtgatgcaggtggtggtgacgccgcaggccgcaggcctggtgaaagccagcgcgcacaagtgcgatctatgccagggccgcgaggcggggccggcctgtgtggaaaactgtcccgcgcaggcgctgaccctcgccgacgatgagacgttgatcaccctggcgaagcagcggcgactgcgctcggcatgccaggaggtgcagccgtggcagcgcgctacgccgctctgcagccagcccaatgctggcgcgaaggtcaggcaaatggcgatgacgcccccgcgcggggagccggataagctggcggcggaggtgcgtaagagccactttgaggagatctatcagccgttcaccccgcagcaggcgcagcagcaggccgcccgctgtctcacgtgtggggagcacagtatttgcgaatggacctgcccgctgcataaccatatcccgcagtggattgagctggttaaagcggggaatatcgccgccgcggtcgcgctttcccatcagaccaactgcctgccggagatcactggccgcgtctgtccccaggaccggctgtgtgaaggcgcctgcaccctgcgcgatgaaagcggggcagtcaccatcggcaatattgagcgctatatttccgaccaggcgctggccagcggctggcgtccggacctttcgcaggtgaagccgagcggcaagcgggtggcgattatcggcgccgggccggccgggctggcctgcgccgatatgctggtgcgccacggcgtccagccggtggtcttcgaccgtcatccggagattggcggtctgctgaccttcggcattccggcgttcaagctggataaatcgctattggcccggcggcgggcgatcttcagcgagatgggtatccgctttgagctcaattgcgaggtggggaaagatatctccatggcgacactgctggccgagtatgacgcggtgttcgtcggcgccggaacctatcgctccatgaaggctgggctgccgaacgaagaggcccccggggtctacgatgcgctgccgttcctcatcgccaacaccaaacaggtgatggggctggcggcatcggcgcaagagccttatgtcaacaccgccgggctgaacgtggtggtgctgggcggcggcgatacggcgatggactgcgtgcgcaccgcgctgcgccacggcgcccgccaggtgacctgcgcctatcggcgagatgaagccaacatgccgggctcgaaaaaagaggtcaaaaacgcccgcgaagagggggcgctctttgagtttaacgtccaaccggtgacgcttgagctggacgagaacgggcgggttaacggggttcgctttttgcgcaccgagctgggcgctccggacgccgggggaagacgccgtccgacgccgatccccggcagcgagtttgttatgccggcagatgcggtgatcatggcctttggcttccacccgcaccgcatgccctggctggaagcggcgggggtggcgctggacagccaggggcgtattaaagccggagtggagagccgttaccgttatcacaccagtcaggagaagatctttgccggcggcgatgccgtgcgcggcgcagaccttgtagtgacggcgatggcggaaggccgtcacgcggcgcaggggatcctggactatctggcgcggaaaacgacgccgcttcactgacgacaaacccggctccgcagcgtagtatgagggcgtccttttacgctgtggggtcggtatgtcactcaatattcacgtcattaaagataaaatcctctctgagaactggttcgtactacgcaacatgacctatgagctgacgcgggcggacggcagcgtcgtgcgccacaagcgcgaggtctacgatcgcggcaatggcgccaccgtgctgctgtataaccgccataagcagacggtggtcctggtgcgtcagttccgtgtcgccacctgggtcaatggcaatcatgacggcatgctgattgaaacctgcgccgggctgctggacaacgacgagccggaagcctgcattcgtaaagaggcggtggaagagaccggctacgaagtgggcgaggtgagaaagctgtttgagctgtttatgtcgccagggggcgtcaccgaggtagtgcatttctttatcgccgagtacagcgacgcgcagcgaaccaccagcggcggcggggtggatgatgaagccatcgaggtgctggagctgccttttagccaggcgctgcagatggtcgctgacggggagatccgcgacggtaaggcggtcattctgctgcaatatctgcaaacctccggcctgatgtcggggaactctgacaaatccgattgagtaacccgctgccgttgtccaggataggcgccgtggtcgggtttatctggggtcgggcggttcatgctttttcgcgtcatctttttcctttttctggcggtgctgccttgctcgcaggcatggtcggcaccgacgcagcagcgcttcaacgactggctggtcacctgtaacaaccaaaatttctgcgtcacccgtaacgtggggctgcatcatggcctggtgatgaccctcagccgcagcgctggggcagtcactgacgccagtctgcgtatcgagctgggcggcaccggcaatccagtggcgacgctcgcgccgatagcgccgcgcctgctgctggatggtaaaccgctgcccctgaccgacaagcgctggcacattgaagataagctcattaaaaccgccgacagcgtgacgatcgatgcgtttctccagcaggttcaggagggtaaagcgctctcgctggccaatggcctgcagaccatctccctgcaggggttgaaagcggctctgttttttatcgacgatcggcaaaagcgggtaggtagcgaaacggcctgggtcggcaaaggggaagagccgccgctcagcgtaccgccggcgccggcgctgcgcgcggtggcgagcgcggaaacggcgcagtcgccgctggggcgtgaggagctcaacgatctgatggactacggtaatgagcggatgaccaacagccactgctccctcgatcccttccgccgtgaaattcgcgttactgcgctgacggatgacaaagtgctgctgatgaccagctgcgaatccggcgcctacaacaccgtctggctggcctggctggtctcccgccagcgcccctatgtcgcccgtcaggtgcggctaacgttgccattccagccgccgggcgaggcgccgcgtgagattgagctgatcaacgccagctatgatgaccgccgccatgagctggtgaccctggataaaggccgcggggccggcgattgcgggatccaaacccgctggcgttttgacggccagcggttcagcctctcccgctacgcgcagcagccgacgtgcgacaactggcaggggccagatgcctggcccacgctgtggatcacccgttaagcacctgttcggcggtggcgacgatatggtcgaccgtaaagccaaagaacgggaacaactgctctgccggggcggattcgccatagccggtcatgccgacgatcttgccttttaagccgacatatttataccagtagtccgctatcccggcttcgaccgccacccgggcgctgacgtccgacggcagcaccgattcgcgccaggcctcatcctgggcgtcaaacacatcagtggaagggagcgagacgacccgcacatttacccctttggccaacagtttttccgcggccaggacggtgatctccacttccgagccggtggcgatgaggatcaggtcgggttttccgccggcatccttaagcacgtagccaccccgggcgatatcctgcacctgttccggggtacgcggcatctgcgccaggttttgtcgcgacaggatcagcgccgtcggcccgccctgtcgcgcgatagccgcctgccaggcgacggcggtctccacctggtcgcaggggcgccaggtgctgaagttgggcgtcagccgcagactggccagctgttccaccgcctggtgcgtcggcccgtcttccccaagaccgatcgagtcatgggtatagaccatgatctgccgggccttcatcagggccgccatgcgcgcggcgttgcgggcgtactccacaaacatcaggaaggtcgaggtataaggaataaagcccccgtgcagggcaatgccgttggccaccgcggtcatgccaaactcgcgcaccccgtagtggatataattgcccgcaggatcttctttaatcgatgtcgatccagaccagatggtcaggttactcggcgcaagatccgcagaaccgcccagcagttccgggaggtgcgggccgtaggcgttcagcgcgttttgcgaagccttgcggctggcgattttcgccggctcggcctgcagtttcgccacgtagtcgcgggcgatcgcggcaaagtcttccggcagggcgccattcatacgtcgggtcagctcagcggccagctccgggaactgctgctggtaggcggtgaatttctcgttccaggcgtgctccgctttttccccgcgcggacgcgcatcccagcccgcgtagatctctttcgggatctcgaacggaggatatttccagccaagctgctggcgggccagcgctacctctttttcgcccagcgccgccccgtgagactcctctgagccggctttgttgggcgaaccgaagccgatgatggtccggcagataatcagtgacggtttatctttcaccgcctgcgcttccgttatcgcctgtttgatagcctgcggatcgtggccgtcgatatcgcctatgacgtgccagtgataggcgcggaagcgttccgccgtatcatcggaaaaccagccttcggttttgccgtcgatggagatgccgttgtgatcgtaaaaaccgatcagcttgcccagtccgagcgtgccggccagcgaacaggcctcatgggagatcccctccatcaaacagccatcgcccatgaacacccaggtgtgatggtcaatgatctcatggccggggcgattaaactgcgccgccagcgtccgttcggcgatggccatcccaacggcgttcgccagcccctggcccagcgggccggtggtggtttccaccccaggggtatagccatgctccgggtggccgggcgttttagagtgcagctgacggaactgcttgagttctgacagcggcagatcgtagccggtcaggtgcagcagactgtagagcagcatcgacgcgtggccgttggacaagataaagcggtcgcggtccacccagtcagggttctgcggattgtgcttgagaaaatcgttccacagcacttcggcaatatcagccatccccatcggcgcaccgggatggccggagttggctttctgcacggcgtccatactcagggcgcggatggcgttggcaagctctcttcgggacatatttttctccgtgagactaaagtgacagtttggcggcaagcagatcttccagtttgcgctgatcgacggcgaacaggcggatcccctccgctagcttttcgaccgccatcggatcctgattatgttcccagcggaactccgcttcactgagcggcaccggacgcggcaggatctggctggcagggatcagtttgcgcaccaccggggtatcgctggcctgcagctcttttaataaaggcggggcgatggtcaaccggtcgcaaccgaccagcgccaggatctgctcggtgcggcggaagctggcgcccatcacgatggtgttgtatttatgctgtttgaaatagtcatagatattgcgcaccgatttcacccccggatcttcctccaccacgtaaggctccagcggtttgcgcgcctgataccagtcataaatacgcccaacgaacggggagatgagataaaccccggcctcggcgcaggcccgggcctgggcgaaggaaaacagcagcgtcaggttgcagtggatcccctctttctcaagcacctccgcggcgcggatcccctcccaggtggatgccagcttgatcaggatccgcgatttatcaatgcccatctcctgatacagcgccaccaggtggcgagccttctcgatacttttctcgcggttgaaggagagccgggcgtccacctcggtggagacccgcccgggaatgcttttgaggatctccgcgccaaaattgaccgccagcttatcgcaggcgtgagccacctgcgcttcgcggccgccaccctgttttttggcccaggcgatagcgtcgtcgatgaggccgctataggacgccaggccggcggccttcagcagcagagaggggttggtggtggcgtcttccggatggtagtggcggatggattcgatgtctccgctgtcggcgaccaccgtggtgaactgcttgatgctgtctaactgattcatggataagtcctcctggaacaaggtgttacatgagtgcttgccggtatacggtataaacattgatgaggtacataaccaaaaagcatagcagacagggctattattggcggcgaatccgggtaacataaccgctataaattgataacaacaaaatcataacgatggccagagtttggcggtgttcaaagtttatcgccccgccaggagggatactgtctgccactgaaaggtgaacgacaggatggtcatcacgcttttcccctacgaacgatacgtgaaagaaaggaatagaaaatggatgagcagttaaaacagagcgccctcgacttccacgaatttccggttcccggaaaaatccaggtctcgccgaccaaacctctcgccacccagcgcgatctggcgctggcctactcgccgggcgtcgcagccccctgcctggaaatcgaaaaagatccgctggccgcctacaaatacactgcccgtggcaacctggtggcggtcgtctccaacggcaccgcggtgctggggctcggcaacatcggcgcgctggccggtaagccggtaatggagggcaaaggcgtcctgtttaagaaatttgccggtatcgatgtgtttgatatcgaagtcgatgagctggatccggacaaattcattaacgtcgtcgccgccctcgaaccaaccttcggcggtatcaacctggaagatattaaagcgccggagtgtttctacatcgagcagcagctgcgcgagcggatgaatatcccggtcttccatgacgatcagcacggcacggcgatcatcagcaccgcggcgatcctcaacggtctgcgcgtcgtcgagaagaatctgtccgacgtgcggatggtggtctccggcgcgggcgcggcggcgatcgcctgtatgaatctgctggtggcgctggggatgcaaaagcacaacatcgtggtctgcgattcgaaaggcgttatctataaagaccgtgagccgaacatggcggaaaccaaagccgcctatgcggtggaagacgatggcaaacgcaccctcgatgacgtgatcgacggcgccgacattttcctcggctgctctggcccgaaagtgctgactcaggagatggtgaagaagatggcgcgggcgccgctgatcctcgccctggccaacccggagccggaaattctgccgccgctggcgaagcaggtccgcgatgacgccatcatctgtaccggccgctccgactaccctaaccaggtcaacaacgtactttgcttcccgttcatcttccgcggcgcgctggacgtcggcgcgacggcgatcaacgaagagatgaagctggcggcggtgcatgcgattgccgagctggcccatgccgagcagagcgaagtggtggcctccgcctacggcgatcaggatttaagctttggtccggactacatcattccgaaaccattcgacccgcggctgatcgtcaaaatcgcccccgcggtggcgaaggcggcgatggattccggtgtggcgacgcgcccgatcgccgattttgacgcctatatcgagaagctgagcgagttcgtctataaaaccaacctgtttatgaagcctatcttctctcaggcgcgcaaagagccgaagcgcgtggtgctggcggaaggggaggagactcgggtgctgcacgccacccaggagctggtgtctctgggactggccaaaccgattctggtggggcgcccgagcgtgattgaaatgcgcatccagaagctgggcctgcagatcaaggccggcgttgactttgagatcgtcaataatgaatccgacccgcggtttaaagagtactggagcgagtactaccagctgatgaagcgccgcggcattacccaggagcaggcgcagcgggcggtgattagcaacaccacggtgattggcgccatcatggtgcatcgcggtgaagcggatgcgatgatctgcgggactattggcgagtaccacgatcactaccgcgtggtgcagccgctgtttggctatcgcgacggcgtcagcaccgccggggcgatgaatgcgctgctgctgccgagcggcaacacctttatcgccgatacctatgtcaatcacgatccgtcgccggaagagctggcggagatcaccctgatggcggcggaaagcgtgcgacgctttggtattgaaccgcgcgtggcgttgctgtcgcactccaactttggctctgccgactgtccgtcagccagcaaaatgcgtaaaaccctggagctggtgaaggcccgcgccccggagctgatgatcgatggcgaaatgcatggcgacgccgcgctggtggaaagcatccgcaacgatcgcatgccggacagcccgctgaagggggcggccaatattctggtgatgccgaatatggaagccgcccggatcagctataacctgctgcgcgtctccagttcggaaggggtgaccgtcgggccggtgctgatgggggtggcgaagccggtgcatatcctgacgccgatcgcctccgtacgtcggatcgttaatatggtggcgctggcggttgttgaagcgcaaaccgaaccgctgtaattttctatttcccccgttaacgcgcggatccgtttccgcgcgcaatatcaggcaggccggtgagtaaaaaacgctgagcctgcctttttaattccaccgcaatattattttctctcctgagtgatccacttcaccttttaaccccacttgccgaaatttgttatttgccgcgctgaaatgtcgtcaccatgaggacagatttcagggggcaatcagtcatggataaagaacgcattattcaggaattcgtaccaggcaaacaggtcacgctggcgcatctgattgcccacccgggagcggagctggcgaaaaagatcggcgtacccgaatccggcgcgatcggcattatgacgctgacgccgggagaaacagcgatgatcgccggcgatctggcgatgaaggccgccgacgtgcacatcggttttctcgaccggtttagcggcgcgctggtgatctacggctcggtcggcgcggtggaggaggcgcttctgcagaccatcggcggattaggccgcttattaaattataccttgtgcgaattaacgaaaagttaattgagagcgaccatgaagcgtattgcgattgtcggcgccgtcggtgcaggaaaaaccacgttatttaatgccctgcaggggaattattccctcgccagaaaaacgcaggcgctggaatttaacgatcgtggcgacatcgatacacccggggaatatttcagccatccgcgctggtatcacgccttaattaccaccttgcaggatgtggacaccctgatttatgtccatgcggccaatgataccgaaagtcgcctgccacccgggttgctggatattggcagccgaaagcaccttatcgtggcgatcagcaaaacggatctgccggatgccaacgtcgccgcggtgcggcagctgctggacgggatggggtttcaggcgccggttttcgccctcaacggttgcgatccgcaaagcgtcgcgccgctggaaaattacttgagtgagctcagccaaaaggaggaagggccaggtgaagaaactcattaccgctaacgatattcgtgccgcccacgcgcgcggcgaacaggcgatgtcagtagttctgcgcgccagcattatcaccccggaagcgcgcgaagtcgccgagctgctgggattcactatcaccgaagacgatggcgccgcgccggcggcgacagcggcggacagcgacaaaacggaaagccagcggatccgggaaaccatcctggcgcagctgccggaaggccagtttaccgaaagcctggtggcgcagctgatggaaaaggtgatgaaggagaagcagtccctggagcaggaggcgatgcagccgggatttgaggcagtgaccggcaaaggcggcatcaaagtgatcgacggcagcagcgtgaagtttggccgcttcgacggcgcccagccgcactgcgtcggcttaacggacctggtgactgaccaggatggcagcagcatggcggccggatttatgcagtgggagaacgccttcttcccgtggacgctgaactacgacgaaatcgatatggtgctggagggcgagctgcatgtgcgccatcagggggaaacgctggtcgccaaagcgggggacgtcatgttcatcccgaaaggctccagcatcgaattcggtaccccgtcgacggtgcgcttcctgtacgtcgcctggccggcaaactggcaatcgctatgaacgatttcattaccgaagcgtggctcagagcgaatcatacgctcagcgaaggcggtgaaatccatcttcctgccgatgcccgcctgacgccctcggcgagggaactgctggaaagtcggcatctgcgggtcaaatttctcgaccgccaggggcgcctgtttgtcgaggatgacgaacagacgccacagccggtgcatgtcctgaccagcagcgaccatccgccccaggcctgctgcgagctttgtcagcagccggtgggcaaaaagccggacaccttaactcatctgacggccgataccctggtggcgaaaaacgatccgcggctggccttccgcgcggtgctggacagcaccatcgccctgacggtgtggctgcaaattgaactggcggagccctggcagccgtggctgacggacatccgttcgcggctgggcaacatcatgcgcgccgatgcgctggaggaaccgctggcggcgcagtcgatagccggattcagcgaggcgcagctgcatcgtctgtcccatcagccgctgcgttacctgggtcacgatcacctggtgccggaggcccgccatgggcgcgatgtcgcgctgcttaatttgctgcgcggcaaagtgcgcgaggcggaggtgaccgcggcgcaggtgtttattacgccgcaatttgcggtccagcgcgccgatattatgcaagcgctcaaccgcctttccagcgcggtctacgtgatgatgatcctgggcgtgacggacgcgccgccggcgctcagccaactgcagcagctgggaggtgaagatgatcattgaccagtgtcgcaaactggcgctgcgtgcccccgccagggtggtgttcccggatgcgctggacgtccgcgtgttgaaggcggcgcattatctgcagcagcagggcctggcgcatccgatcctcgtcgccagccccttcgcgctgcggcagttcgcccttggcgaacgtctgccgctgaccggggtgcaggtcatcgatccgcacagcaacctggcgatgcgcgaggcgtttgccgccgcctggcaggcgcgcgccggcgataaagcgcccgctgacgcggtcgacaagctggccgacccgctgatgttcgccgcggcgatggtcagcgccgggcaggccgaggtgtgtatcgccggaaatctctcgtcaaccgccagcgtgctgcgcgctggtctgcgccttatcggcctgcagccgggatgtaaaacgctctcttcgctgtttctgatgctgccgcagtatgccggacagccgctggggtttgccgactgcagcgtggtgccgcagccgaccgcggcgcagctggcggatatcgcgattgccagcgccgagacctggcaagcgatcgctggcgaagcgccgcgggtggcaatgctgtccttctcgacatacggcagcgcccggcatccctgtgtggctaacgtccagcaggccacggagatcgtgcgtcagcgggcgccgcagctgatggtcgatggcgagctgcagtttgacgccgcctttgtaccggacgtcgctgcgcacaaagcgcccggcagcccgctgcagggccgggccaatgtgctggtcttcccgtcgctggaggcgggcaacatcggctacaaaatcgcccagcggctgggcggatatcgcgccatcgggccgctgatccagggcctggccgccccgcttcacgacctctcgcgaggctgtagcgtagaggaaattatcgaactggcgctggtggcgtcggtaccgcgccagacggacgcaagccggatccccgactcgtccacgctggttgaatgaatggtccccttcaggaccccttatgagaggaaaacacaatggaagcattaggaatgattgaaacccggggcctggttgcactgattgaggcctccgacgccatggtcaaagcggcccgcgtcaagctggtgggagtgaaacagatcggcgggggcctggtgaccgccatggtgcgcggcgatgtcgcggcgtgcaaagccgcgacggatgccggggcggcggcggctcagcgtatcggtgagctggtctctgtacatgtcatcccgcgcccgcatggcgatctggaagaggtcttcccgattagcttcaagggcgacagcaacatctaacgggggagggggtgccggaaaattctggccggataagacgccagcgcgtcgctatccggccatgaaaaggcatgaatgccggatggcgttgcgcttttccggcctgcacatcacacgcggagacggacatgaagctggctgtggtaaccggatatgtggtctgcaccgtacgccatgaaggtctggcccacgacaaactgctgatggtggagatgctcaatgcccgcggcgagcccgacgggcaatgtgcggtcgccatcgacagcatcggcgcgggatgcggagagtgggtactgctggtcagcggcagctcggcgcgacaggcgcacgcacacggcgcctctccggtcgatctgtgcgtgattggtatcgtggatgaggctgcggccgatggtcaggtgctcttccataagtagggtgaaaaatcatgaatcaacaggacattgaacaggtagtgaaagcggtactgctgaaaatgaaagacagcagccagcctgccggcaccgttcatgatatgggcgtttttgcctcactggatgacgctgtcgcggcggcaacggtggcccagcagggattaaagcgggtggcgatgcgtcagcaggtgattcaggccatgcgtgaggcgggtgaaaagtatgcccgtgaactggcggagcttgcggtgacggagaccggcatgggacgcgttgaagataagtttgccaaaaacgtggcgcaggcgcgcggcacgccgggcgtggagtgtctgactccgcaggtgctcaccggcgataacggcctgacgctgattgaaaatgcgccctggggcgtggtggcctcggtgacgccgtccaccaatccggcggcgacggtgatcaacaacgccattagcctgatagccgccggcaacagcgtggtcttcgccccccatccggcggcgaaaaaggtctcgcaaagggcaattaccctgcttaaccaggcggtagtggccgccggcggcccggccaacctgctggtgaccgtggcgaacccggatatcgacaccgcccagcggctgtttaagtaccctggcatcggcctgctggtggtgaccggcggcgaagcggtggtcgaggcggcgcgcaaacataccaacaaacgcctgatcgccgccggggctggcaacccgccggtggtggtggatgagactgccgatctaccgcgcgccgcgcaggcgatcgtcaaaggcgcctcttttgataacaacattatctgcgccgacgagaaggtgctgatcgtggtcgatagcgttgccgacgaactgatgcgcctgatggaaggccagcaggcggtgaaactcacggcggcgcaggccgaacagctccagccgctgctgctgaaaaatattgacgagcgcggcaaaggcacggtcagccgcgactgggtcggtcgcgacgcgggcaaaatcgccgcggcgattggtctgcaggtgccggcgcaaacccgcctgctgtttgtggaaacgcccgccagccatccgtttgctgttactgaactgatgatgccggtgctgccggtggtgcgggtggcgaacgttgaagaggccatcgccctggcggtgcaactggaaggcggctgccaccacaccgcggcgatgcactcgcgcaacatcgacaacatgaaccagatggcgaatgccatcgacaccagcatcttcgtcaaaaatggaccgtgcatcgccgggcttgggctgggcggcgagggctggaccaccatgaccatcaccaccccaaccggggaaggggtgaccagcgcgcggaccttcgttcgtctgcgccgctgcgtgctggtggatgcgtttcgaatcgtataagggatgaacatggcgcacgacgaacaacgctggctttcgccgagactacaaaaagccgctgccctgtgtaaccaggcgcccgccgccagcgagtcgccgctgtggctgggcatcgatttgggcacctgcgacgtggtgtcgatggtggttgaccgtgacggccagccggttgcggtatgccttgactgggccgacgtggtgcgcgacggcatcgtctgggatttctttggcgccgtcaccctcgtgcgccgacatcttgcgactctcgagcaggagctgggctgccgcttcacccatgcggcgacctcgtttccgcccggcaccgatccgcgcatttcgatcaatgtcctggagtccgccgggctggagatcagtcatgtgctggatgagcctaccgcggtggccgatctgctgcagctcgataacgccggggtggtggatatcggcggcggcaccaccgggatcgccatcgttaaacagggcagggtgacgtattcggcggatgaagccaccggcggccaccatatctccctgactctggccgggaatcgcagcatcgggcttgaggaggcggagcagtacaagcgcagccacgccggggagatctggccggtggttaagccggtgtacgagaagatggccgaaattgtcgcccgacatattgccggacaagggattgtcgatttgtggctggcaggcggcgcctgtatgcagccgggtgtgcatgagctgtttcgtcagcgcttcccggcattaccggtgcatttgccgcagcacagcctgtttatgaccccgctggcaatcgccaacagcgggagggaaaaagcggaggggatgtatgcaagctgaactgcagacggcgctgttccatgcctttgatacgctgaatcttcagcaaatgaaaagcttcaacgttccgccggtgacgctgcacggcgtcggcgcgctggcggcctgcggtccgcaagcgcagtcccggggccttaggcatctgtttgtcatggttgacagttttctccatcaggcgggaatgaccgccgggctggagcgtagcctggcgatgaaagggattgctatgactctctggccctgtcccgccggcgaaccctgcgtcaccgatgtctgcgccgccgtcgcccagctgcgggacgcgcgctgcgacggcgtggtggcctttggtggtggatcggtactggatgcggcgaaggcggtggcgctgctggtcgccaatcctgagcagacgctgggggagatgacggagcacagcgagttgcgcccacgtctgccgctgatcgcggtgccgaccaccgctggcaccgggtctgaaaccaccaatgtgacggtgattatcgatgcggtgagtggacgcaaacaggtgctggcgcatgcctcgctgatgccggatgtggcgatcctcgacgccgcgctgaccgaaggcgtcccgccgcatatcacggcaatgaccgggattgatgcgctgacccacgccgtcgaggcctacagcgcccgccacgccacgccgtttaccgacagtctggcgatgggggcgatagccatgatcggcgaggcgctgccgaaagcggtgggctgcggtcaggatctggcggcgcgggagaacatgctgctggcttcctgcatggcggggatggcgttttccagcgccgggctggggctatgccatgccatggcgcatcagccgggggcggcgctgcatattccgcacggtctggccaacgccatgctgctgccaacggtgatggagtttaaccgcatggtgcgccgggcgcgcttcagccagatcggccgggcgttaaccggcaagaaaaccgatgaccgcgaggctatcgccgccgtgcgcgagctgatcgccgaggtcggtctgacgatgcggctgacggaggctggcgcgacgtccgcgcactacgccgcctgggcgcaagcggcgcaggaggacatctgtttgcgcaccaatccacgcaccgccagccgggagcagattatcgagctgtacgcggcggcgcgataaatgccgattttcccggaggcgtgtggctgtggctttcccggctcgtgctgcgcttagccgggctacaggatcacagccgtctgctatgccgtagcccgggtaaggcgttcacgccgcggcccgggaaagtcgcctgagtgcggctaatgtcccggtattcacagtatctacaaatcataaatgacagggagtaagggctatgggaattaacgaaatcatcatgtacatcatgatgttctttatgctgattgccgccgtggacaggatcctgtcgcagttcggcggctcggcgcgctttctcggcaaactggggaaaagcattgagggatccggcggtcagtttgaagaagggtttatggcgatgggcgcgctgggcctggcgatggtcgggatgaccgccctggcgccagtgctggctcatctgcttggtccggtgattattccgctgtatgagatgctcggcgccaacccgtcgatgttcgccggcacgctgctggcgtgcgacatgggcggtttcttcctcgctaaagaactcgcgggcggcgacgtggcggcctggatgtactcaggcctgatcctcggctctatgatggggccgaccattgtgttctccattccggtggcgctcggcattatcgaaccaaccgatcgccgctggctggcgctcggcgtgctggcgggcattgtcaccattcccatcggctgtatcgccggcggtctggtggcgatgtattccggggtggagatcaacggccagccggtagagtttaccttcgcgctgatcctgatgaatatgatcccggtgatcatcgtcgccgtgctggtggcgctggggctgaagtttattccggaaaaaatgatcaacggcttccagatcttcgccaaattcctcgtggcgctgatcaccatcggcctggcggcggcggtgatcaagttcctgctcggctgggagctgatccccgggctcgatccgatctttatggcgcctggcgaccagcccggcgaagtgatgcgcgccatcgaagtcattggctctatctcctgcgtgctgctcggcgcttatccgatggtgctcctgctgacccgctggtttgaaaagccgctgatgcgcgttggtaatctgctaaaaatcaacaatatggctgccggcggcatggtcgctaccctggcgaacaatattccgatgttcggcatgatgaagcagatggatacccgcggaaaagtgatcaactgcgccttctcggtgtcagcggcgttcgccctcggcgaccatctcggttttgcggcggccaacatgaacgccatgatctttccgatgattgtcggcaagctggtcggcggcgttaccgcgattggcgtggcgatgctgctggtgccaaaagatgaaaacgtaccggcgcctgccaacaacgaagcggaggcgcactcgtgaacacgcgccagctgttgagcgtcggtattgatatcggcaccaccaccacgcaggtgatcttctcgcgcctcgagctggtgaaccgcgcggcggtttcccaggtgccgcgttatgaattcatcaaacgcgacattagctggcaaagcccggtcttctttacgccggttgataagcagggagaactgaaagaggccgagcttgaggcgctgattctggctcagtaccgggccgcagggatcgctccacaagcggtggattccggggcgatcatcatcaccggcgaaagcgcgaaaacccgcaatgcccgcccggcggtgatggcgctctcgcagtcgctgggcgattttgtcgtcgccagcgccgggccgcatctggagtcggtcattgccggacacggcgccggggcgcagaccctgtcccggcagcggatgtgccgggtgctcaatatcgatattggcggcggtacctcgaactatgccctgtttgacgccggaaacgtcagcgccaccgcctgcctcaacgtcggcggccgcctgctggaaaccgacgctcaggggcgcgtggtccacgcgcacccgccggggcagcggattgtcgatgcgctgtttggcgccggcactaacgccctggcgctgaccgccgggcagctggcgcaggtggcgcgccggatggcggcgctgatcgtcgaggtgatcgagggcaccctctcaccgctggcgcaggggctgatgcaaaccgaagtactgcctgcgggtattcagccggaggtgattaccctttccggcggagtgggggagtgctaccgccatcagcccgccgatcctttctgtttttccgatatcgggccgctgctggccacggccctgcatgagcatccgcgcctgcgtgagatgaacgtgcagtttccgacgcaaaccgtgcgcgccacggtgattggcgccggggcgcatacgctgtccctgtccgggagcaccatctggctggagggggttccattgccgctgcgcaatttgccggtggctatcccgcaggatgccgccgatctgccgaacgcctggctccaggcgctgacgcagctcgatctggctcccgaggcggacgcttacgtgctggcgcttcccgcttcacttccggtgcgctacgccaccttactgaccgtaattgacgccctgctggcgtttgtcgcccgctttcccaatccccgtccgctgctgctggtggccgagcaggattttggcaaagcgctgggcatgctgctgcggccacagcttccacaccttccgctggcggtcatcgatgaggtgagcatccgggcgggagactatatcgacattggtacgcctctttttggcggatcggttgtgccggtgacggtgaaatcactcgcatttccttcctgagggaacgacttatgaaactaaagaccacattgttcggcaatgtttatcagtttaaggatgtaaaagaggtgctggcgaaagccaacgaactgcgttcgggggatgtgctggcgggggtagcggcggagagttcgcagcagcgcgtggccgccaagcaggtgctctccgatatgacggtggccgatatccgtaataacccggtgatcccgtatgaggaggactgcgttacgcgcctgatccaggatgacgtgaacgaaaccgcctatcagcggattaaacactggaccatcagcgacctgcgggaatacgtgctcaacgacgaggtcatcagcgacgatatcgcctttgtccgcaaagggctgacctccgaggtggtggctgcggtggccaagatctgctccaacgccgatctgatctacggcggtaaaaaaatgccggtgatcaaaaaagccaataccaccatcggtctgccggggacctttagctgccgcctgcagccgaacgatacccgcgacgacgtgcagagtattgccgcacaaatctatgaagggctctccttcggcgcgggcgacgcggtgattggcgtcaacccggtcactgacgacgtggagaacctgagccgggtgctggatacggtgtacggggtgatcgacaagtttaacatcccgacccagggctgcgtgctggcgcacgtcaccacccagattgaagccatccgccgcggcgcgccgggggggcttatcttccagagcatctgcggcagtgaaaaagggcttaaagagttcggcgtcgagctggcgatgctcgatgaagcgcgggcggtgggggcggagtttaaccgcatcgccggggagaactgtctttactttgaaaccgggcagggctcggcgctttccgctggcgctaacttcggcgccgaccaggtgaccatggaagcgcgtaactatggcctggcgcggcactacgatccgttcctcgtcaacaccgtggtgggctttatcgggccggagtacctctataacgaccggcaaatcattcgcgccggactggaagaccactttatgggcaagctgagcggcatctcaatgggctgcgactgctgctataccaaccatgccgatgccgaccagaacctcaacgaaaacctgatgatcctgctggcgaccgcaggctgcaactacatcatgggcatgccgctcggcgacgacatcatgctcaactaccagaccaccgccttccacgataccgcgaccgtgcgccagctgctgggcctgcggccgtcgccggagtttgaacgctggctggaaacgatgggcattatggcaaatggtcgcctgaccaaacgggcgggcgatccgtcactgttcttctgatgacgcggggatgacacatcatggatcaaaaacagattgaagacattgtacgcagcgtaatggcgtcaatgggacaaccacagtcgcagccgcaggcccccgcagcgtcgacgccggcctgccatgtcgcctgcgccagcgaagcggtggtggaaagctgcgcgctggacctgggctcagcggaagcgaaagcctggattggggtacaacatccgcaccgcgccgaagtactgaccgaactaaaacgcagtaccgcggcgcgcgtttgcaccggccgcgccggcccgcgtccgcgcactcaggcgctgctgcgcttcctggccgatcactcgcgctcgaaagacacggtgctcaaagaggtgccggaagcgtgggtgaaagcgcaggggctgctggaagtgcgttccgagattagcgataagaacctctacctcacgcgtccggatatgggccgtcgcctcagtccggaagcgattgatgcgctgaaggcgcagtgcgtgatggatccggatgtgcaggtggtggtctccgatggcctgtcgacggatgccatcaccgccaactacgaagagatcctgccgccgctgcttgccggcctgaaacaggcgggtctgaaggtcgggacgccgttcttcgtgcgctatggccgcgtcaagattgaagatcagatcggcgagatcctcggcgcgaaggtggtgatcctgctggttggcgagcgcccggggctcggccagtcggagagcctctcctgctacgcggtgtactccccgcgggtggcgaccaccgtcgaggccgaccgaacctgtatctccaatatccaccagggcggcaccccgccggtagaagccgccgcggtgatcgtggatttagccaaacgcatgctggagcagaaagcctccggcatcaacatgagccgttaaggaggcatcatgccagcattagatttgattcgaccctcggtcaccgcgatgcgcgtgattgcctcggtgaatgacggtttcgcgcgcgagcttaaattaccgtcgcatatacgtagcctcggactcatcacggcagattctgacgatgtgacgtatattgccgccgacgaagcgacaaagcaggcgatggtggaggtggtctatggccgctccctctacgccggtgcggcccatggtccgtcgcctaccgccggcgaagtactgatcatgcttggcggcccgaacccggcggaagttcgcgccgggctggatgccatgatggcgcatattgaaggtggggcggcattccagtgggctaacgacgcgcaagataccgcctttctggcgcacgtggtgtcgcgtaccggctcttatctttcatcggccgctggcatcgcgttgggcgatccgatcgcttatctggtggcgccgccgctggaggcgacgtttggtatcgatgcggcgatgaagtcggccgacgttcagctggtgacctacgtcccgccgccatcggaaaccaactattcggccgcctttttgacgggaagccaggccgcctgtaaagccgcctgcaatgcctttaccgatgccgttctcgatattgcccgtcatcctgtacagcgtgcgtaatggagggagcgatgatcaatgcgctgggattgctcgaagtggagggcatggtcgcggctgtagacgctgcggatgccatgcttaaggcggccaatgtgcgcctgctcagtcatgaagtgctcgacccgggcaggttaacgctggtggtggagggcgacctggcggcctgccgcgccgcgctggatgccggggccgccgctgcccggcggaccggctgcgtgatcagccgtcgggaaattggccgcccggaagaggatacccagcggctgatcggcggttttcagccaccgccgccagcgaccatgccgcctgctgacccggcttcatcggaagccttactgacgctgctggcttcagttcgtcaaggcatgacggccggcgaggtcgccgcgcattttgcctggccgctggataaggcccgccaggcgctggagcagctcttttccgcagggtcgctacgaaaacgcagtagccgctatcgtctcaaaaatccataacctgtcggaggtgccgggagcggcttgcccccggctttaacgattatgaaaaagcgtcgttctgcaaatttgcaccatctctgttgcgaggcgttgccggaagacatcaggctgacgcctcaggttgaaattgacaatattcatcaacgacacacaaccgatgtgtatgagcacgccctgaccattaccgcctggcaacagatctacgatcagctgcatccggggcagtttcgcggcgagtttaccgaaatcctgctcgatgagatccaggtcttccgcgaatataccgggctggcgctgcgccagtcctgcctggtctggccgaactccttctggtttggcattccggcgacccggggagaacaggggtttatcggctcgcagtgtctgggccgggcagaaatcgccacccgtcccggcggtacggagttcgagctcagcacgccggatgattacaccattctcggggtagtgatttcgcaggaggtgattgcgcgtcacgccagtttcctgcaccacccggaacgggtgctacatatgctacgcaaccagtcagcgctggcggtccgcgagccgcataaggccgcgctgtgggggtttgtccagcaggcgctggccacctttagcgagcatccggatacccttcatcagccggccgtgcgtaaagtcctgcgggataatctgttgctggcgatgggcacgatgctggaagaagcgcagccgatggtaagtgcagagagcgtcagccaccagagctaccgccgcctgctggcgcaggcgcgcgaatatgtgctggaaaacagcgcggagccgttaaccgttctcgatctgtgccagcagctgtacgtcagccgtcgcaccttgcaaaacgccttccatgcgatactggggattggtcctaacgcctggctcaaacggatccgcctgaacgccgtgcgtcgggagctgataagcccctggtcagagcgcgagacggtcaaggaggcggccatgcagtggggattctggcatttggggcagttcgccaccgactatcagcagctgtttgctgagaaaccgtcgatgacgctgcaccatcgcctgcgccagtgggtgtgagggaagagactccgctaccgggtggccagccgccatccggccgttacagccagtcgcgcacctgaataaactcgctcagcgccgcctcggggctgccgggctcgggctgataatcatattcccagcgcaccagcggcggcatcgacatcagaatcgactccgtacgcccgccggtctgcaggccgaacagggtgccgcggtcccagaccagattgaactcgacatagcggccgcgacggtagagttgaaagtggcgctcgcgttcgccgtacggcgtggctttccggcgttcgacgataggtaaataggcgtcagcatagccgttcccgaccgcctgcataaaggcgaagcagtggtcaaaatccggggtgttcaggtcgtcaaagaacaggccgccgatgccgcgctgctcctggcggtgcttgagatagaagtaatcatcgcaccattttttatagcgcggatagacttcctcgccgaacggcagacacagatcgcgggcggtacgatgccagtggacggcatcctcttcaaagccgtagtaaggggttaaatcaaagccgccgccgaaccaccacaccgggtcggcgccaggcttttcggcaataaagaaccgcacgttggcatggctggtgggcacgtaggggttcagcggatgaaccaccagcgagacgcccatggcttcaaaactgcgtccggccagctccgggcggtgcgcggtggcggaggcaggcatggcgtcgccatggacgtgggaaaagttgacccccgcctgctcgaacacccggccttcgcgcagcacccggctgcgtccgccgccaccgccttcccgctgccaggcatcttcaataaacggcgcgccatccacggcgctcagctgctgactgaggttgtcctggagctggagcagaaaagtttttacctgcgcggcatcgggtttcattaacgtctcttcgaatgggctttctggttatcgaaccagtggaaatagctgataatgccgttggcaatcgcggtggcgattttctgccggaaggcggtggtgccgagcagtttctcctcgttcgggttggtgataaacgaggtttccaccagcacggacggtatggatggtgacttcagcaccacgaacgccgcctgctcggtattgcggctgtgcagcttatgtaccggcttgatctttttcaggatatgcgagcccagcgtcaggctgtttttgatggtgtcggtctgcaccagatcgaacagtacctgctgcagcagatggtctttatccgtcgctttcttaccggcgacctcatcggcgcggttttcgcgatcggagaggtatttcgccatggcgctactggcgccgcggtttgacagggcgaacaccgaggcgccggcggcgctcgggttggtaaaaccatcggcgtggattgacataaacagatcggcgccgtgctgatgggcgatctccacgcggtcgtacagcgggataaaggtatcgccggtgcgggtcaggcgggcgtcgatgccgttgctgcgcaaaatgctgcgcacgttcttagcgatcgccaacaccacatgcttctctttcgagccgttatggccgatagcgccggtatcgatgccgccgtggcccggatctaacattacaatccggcgacccccggcctttttggcggcgggtttgctatgtccatttgacgttttcagtggctgttcttttgcgctgacctgtgaggcgacgccgctcagcgtcatcgcagccagcccggctttcagcacctgacggcgcgaagcaagtatttttaagggtttaaaagtgctcattcggcctgaattgtaaacaagtgatgtccaatgttatatcgtatcgcgtttgccgttacgaccattcaaaataagaattgttttacttttcatttcaatacatgacaaagtcatattatgccattttttgtcgctgatttcgcctgatattggctatcagttatattcgcgccataatcactgtttttaaccgtcaatggtggggaataccatggagattcgcgtttttcgccagcaggatttcgaagaggttgtgacgctgtgggagcgctgcgatctgttgcgcccgtggaacgatccggagatggatattgagcgcaagctgaatcacgacgtcagcctgtttctggtggcggaagtgaatggcgaagtggtcggcacagtgatgggcggatatgacggtcatcgcggatcggcctattatctcggcgtccatccggaatatcgcggccggggtatcgcgaacgcgctgctcaaccgtctggagaaaaagctgattgcccgcggctgcccgaaaatcaacattatggtccgtgaagacaacgacgtggtgcagggaatgtacgagcggttgggctatgagtacgccgatgtcctgaccctgggcaagcgcctgatcgaagatgaagaatactgagtttatccccgccgattttgatgcccatggccgtctgcgcctgcctttgcttttctggtgcgtgctgttgttgcaggcccgcacgtgggtgctgtttttgatagccggcgcatcgcgccagcagggcgacgcgattcttaatctgttctatcccgatcacgagcgcttctggcttggtttactgccaggcgtgccggcggtgctggcctttctgcttagcggctatcgtcagcgcctgccgcgcctgtggcgggcgatgcgctggctgctggtgctatcgcaagtgctgctgttgctgtggcagccgatgctatggctgagcggcgaatctccctcctcgttgaccattgcgctgctggtcgcggatggctatgccctgtggtggctgttaaccagccgtcgcctgggcgcctgttttcaccagaccaccttttaatggcactttttgccgatcgtgaactccaacatgcgttgaatgactcagaaaggattgagatatgaaatcgctacgtgtaatgctctgtgcgcttccgctggcgctgaccggctgctccacgatgagcgcagtcaactggtcggcggcctatccgtggaactggtttggcgcttccaccgaggtgaccgagcagggagtgggtaaactgacggcctccacgccgctcaatgaacaggcgattagcgatgcgctgggcagcgactaccgtttacgcagcggaatgaagaccgataagggcaatatcgtccactactttgaagcgctgaaaaacaacagcgtggcgctgaccatcaatggcgacaacggtgctatcagccggattgacgtgcgtgatgcggatatcaaaaccgccagcggcgtgaaaatcggcacaccgtttagcgacctgtacagcaaagccttcggcaactgccagaaaggcagccatgacaacggggcggtcgtcgagtgtcaggccgaggggagccagcatatcagctatgccttcactggccactggagcggtccggacgagctgatgccctccgacgatacgctgaaaaactggaaggtcagcaagattatctggcgtcgctaaattgatctgaagagacacgacagctctgaaaaacggttacaatggcgcgttagcaacgcgacagcgttgtggttgcatcatttcaggaggagcgatgtctcaggttcagagcggcattttgccggaacattgccgcgcggcgatttggattgaagccaatctcaaaggggacgttaacgccctgcgcgaagcgagcaaaatttttgtcgataacgtggccaccttccaggctaaattccccgacgccaaactcggtgcggtggtggcgttcggcaataacgtctggcgtcagctgagcggcggcgaaggggcggatgagttaaaagatttcccggtctatggcaaagggctggcgccgtccacccagtatgacctgctgattcatattttatccgcccgtcatgaagttaacttctcggtggcgcaggccgcgctggccgcctttggcgacgctatcgacgtgaaagaagagatccacggcttccgctgggtggaagagcgtgacctcagcggcttcgtcgatggcaccgaaaacccggcgggggaagaaacccgccgcgaagtggcggtcattaaagacggcgtggatgcgggcggcagctacgtgttcgtccagcgctgggagcataatctcaaacagctgaaccgcatgagcgtgccggatcaggagatgatgatcggccgtactaaagacgctaacgaagagatcgatggcgatgaacgtccggtcacgtcgcacctgagccgcgtggacttaaaagaagatggcaaagggctgaaaatcgtccgtcagagcctgccgtacggcaccgccagcggcacccatggcctctatttctgcgcctactgcgcgcgcctgtataacatcgagcagcagctgctgagcatgtttggcgataccgacggtaaacgcgacgcgatgctgcgcttcaccaaaccggtgaccggcgggtattacttcgcgccgtcgctggagcgtatccaggcgctgtaatttttcctctcacccgtcccctctccccaaaggggagaggggacggtaaggtgcggctatgggatctgcgtgcggattcttttactccctctccctcagtcagaggggaggggtgagggcattggcggctcaggtgcttcaagtatcgcctccatcaccgcatcttcatgctcttcaaactcattattccagaagcgtaaaactcgccatccctcgctctgttgccagcgggtgcggcgtcatcgtgttggccgccgtccagttcaatcgccagccgtattgcgcagcaggcgaaatcgagaatatagggggcaacggggcgctggcggcgaaacgtatcgctagcaaaacggcggttgcccagtcagtaccctggtcgacgttctgcgggcgttaagctacgtctgagctgacgagcaaatatctgtgtgtttttcatataaacacagtgcacgcctggctgccgtttgtcacaatgacccgtctaatctgcgagccgctttcagctaagctttgccagttgcttattcccttttcgacttccaaatcgccaaacggtatataaaaccgttactcctttcgtacccgttataaatatgatgatcatcagaaaatgttcaacgttgataagggtgcgcaatggccgttaaatcactgaaaaaaggatatctggcgctggcggcttccatgctgctggtggcgcagacgcaggcgacggagctgctgaacagctcctatgatgtctcccgcgagctgtttgccgcccttaacccgccttttgagcagcagtgggcgaaagacaatggcggggacaagctgaccatcaagcagtcgcatgccggttcatccaagcaggcgctggctattttgcagggcctgaaggcggacgtggtcacctacaaccaggtgacggacgtgcagatcctgcatgacaaaggcaacctgatcccggccgactggcaaagccgtctgccgaacaacagctcaccgttctattcgacgatgggtttcctggtgcgtaaaggcaatccgaaaaacattcatgactggaacgacctggttcgctctgacgttaagctgatcttcccgaatccgaaaacctcgggtaacgcccgatacacctacctggcggcatggggcgcggcggataaagctgatggcggcgataaagctaaaaccgaacagtttatgactcagtttctcaagaacgtcgaagtctttgacaccggcgggcgcggagcgaccaccaccttcgccgagcgcggcctcggcgatgtgctgattagcttcgaatcggaagtgaacaatattcgcaagcagtatgaggcgcagggatttgaagtggttatcccgaaaaccaacattctggcggagttcccggtagcctgggtcgataaaaacgtcaaagccaatggcacggaaaaggcggcgaaagcctacctgaactggctctatacgccacaggcgcaaactatcattaccgactactactatcgggtaaacaacccgaaagtgatggatgctctgaaggataaattcccgcagaccgagctgttccgcgtggaagataagtttggctcctggcctgaggtgatgaaaacccacttcgccagcggcggcgaactggacaaactgctggcggcggggcgtaagtaatgtttgctgtgtcgtccaagcgcgtgctgccgggttttaccctgagccttggcaccagcctgctgtttgtctgtctgattttgttattaccgctcagcgcgctggtgatgcagctggcgcagatgagttgggcgcagtactgggatgtgatcaccaacccgcaggtggtggctgcctataaggtgacgctgctgtcggcgtttgtggcctcgatttttaacggcgtctttggtctgctgatggcctggatcctgacccgctatcgttttccgggccgcacgctgctggatgccttaatggacctgccatttgcgctgccgacggcggtagccggtctgaccctggcctcgctgttttcggtgaacggtatttacggggaatggctggcgaagttcgatattaaagtcacctatacctggctcggcatcgccgtggcgatggccttcaccagcatcccgtttgtggtacgcaccgtgcagccggtgctggaagagttggggcccgagtatgaggaagcggcggaaacgctgggcgccacgcgctggcagagtttccgcaaggtggtgctgccggagctgtcgccggcgctgctggcgggcattgctctgtcgtttacccgcagcctcggcgaattcggcgcggtgatttttatcgccggcaacatcgcgtggaagacggaagtaacgtcgctgatgatctttattcgtctgcaggagtttgactatccggcggcgagcgccatcgcctcggtgatcctggccgcctcactgctgctgctgttttccatcaataccctgcagagtcgctttggtcgacgcgtggtaggtcactaatggcggaagttactcaattgaaacgctacgacgcgccccgtatcaactggggaaaatggtttctgattggcgtcgggatgctggtctccgccttcatccttgtggtgccgatgctctacatctttatccaggccttcagcaaaggattgatgccggtgctggaaaacctggcgaacccggacatgctgcatgccatctggctgacggtgatgattgcgttgattaccgtaccggtaaacctggtgttcggtaccttgctggcctggctggtgacacgttttacctttccggggcgccagctgctgctgacgttgctggatatcccgttcgccgtctcgccggtggttgccggtctggtgtatctgctgttttacggctctaacggtccgctgggcggctggcttgacgcgcataatctgcaaatcatgttcgcctggccgggcatggtgctggcgaccatctttgttacctgtccgtttgtggtgcgtgagctggtgccggtgatgatgagtcagggcagtcatgaagatgaggccgcggtgctgctgggcgcgtccggttggcagatgttccgccgggtgacgttgcccaatattcgctgggcgctgctgtacggcgtggtgctgaccaacgcccgcgccatcggcgaatttggcgcggtgtcggtggtttccggctcgatccgcggcgaaacgctgtcgctgccgctgcaaattgaactactggagcaggattacaacaccgtcggctcgtttaccgccgctgccctgctgacgttaatggctattctgaccctgtttttaaagagtatgttgcaatggcgtctggccaatcagaaagaacgcgcgcaacaggagggaaatcatgagcattgagattgccaatattaagaaatcgtttggtcgcacccaggtgctgaatgatatctcgttggatatcccttccggacaaatggttgcgctgctggggccctcgggctccggaaaaaccaccctgctgcgaattatcgccggtctggagcatcagaccagcggtcatatccgcttccacggtaccgacgtcagtcggatgcacgctcgcgaccgtaaagtgggcttcgttttccagcactatgcgctgttccgccatatgacggtgttcgataacatcgcctttggcctgaccgtgctgccgcgccgcgaacgccccaatgcggcggcgattaaagccaaggtgaccaaactgctggagatggtgcagctggcccatctggcggatcgctatccggcgcagctgtccgggggccagaagcagcgcgtggcgcttgcgcgcgccctggcggtggagccgcaaattttgctgctggatgaacctttcggtgcgctggatgcgcaggtgcgtaaagagctgcgccgctggctgcgtcagctgcatgaagagctgaaattcaccagcgtgttcgtcacccacgatcaggaagaggcgatggaagttgccgaccgggtggtggtcatgagccagggcaacatcgaacaggccgatgccccggagcgcgtatggcgtgagccgtctacccgtttcgtgctggagtttatgggggaagtgaaccgcctgcagggggtcatccgcggtggacagttccacgtcggcgcccaccgctggccgttaggctataccccggcataccaggggccagtggacctgttcctgcgcccgtgggaagtggacatcagccggcggaccagcctggattcgccgctgccggtgcaggtcctggaggccagtccgaaagggcactacacccaattagtcgtccagcctctggggtggtatgacgaaccgctgagcgtggtgttaacgggcgacgaggcgccgtcccgcggcgaacggctgttcgtcgggctgcaaaacgcgcgtttgtacaacggtaccgagcgtatcgagccgcgcggcgagcttgctctggcggagtcggcctgatagcttaaatccatgtgcttttgccgggtgaggctctgcttacccggtctggaattatcacgcgtctgccaggccgggtaagcgaagcgccgcccggctttcttattgagtaaaaatcgtgaatacactcgaacaaaccatcggcaataccccactggtcaaacttcagcgtctgggaccggacaacggcagcgaagtgtgggtcaaactcgaaggcaataatccggccggctcggtgaaagatcgcgccgcgctgtcgatgatcgtcgaagcggaaaagcgcggcgaaattcagcccggcgacgtgctgatcgaagcgaccagcggcaacaccggtattgcgctggcgatgatcgccgcgctgaaaggctaccggatgaagctgctgatgcccgacaacatgagccaggagcgtcgggccgcgatgcacgcttacggcgccgagcttatcctggtcagcaaagagcaagggatggagggtgcccgcgacctggctctggagatggcccagcgcggagaaggcaaactgctcgatcagtttaacaacccggataacccctacgcccactacaccaccaccgggccggaaatctggcagcagaccgcggggcgtatcacccactttgtctccagtatggggaccaccggcaccattaccggcgtgtcacgttttctgcgtgaacagagtaaaccggtgaccattgttggcctgcagccggaggaggggagcagtattcccgggatccgccgctggccggcagagtatatgccggggatctttaacgcttcgctggtggatacggtgctggatattcatcagcaggatgccgagaacaccatgcgtcagctggcggtgcgggaaggcattttctgcggcgtcagttcgggcggcgcggtagcgggcgcgttacgcatagcccgcgaaaatcctggcgcggtggtggtggcgatcgtctgcgatcgcggcgatcgttacctttccaccggcgtgttcggcgaagaacactttagccagggggcgggcatttaatcatcaagcaggtcggtgccgtaggagttatcgacggtgcacagccagcgttcgccctgcttctgaaagacataggtggcgcgtcgcgtgaccttggatatcccgtccgccgtcgggatatccagccgggtctccataatcaccagcgcattgccgccgccttcaataacctccattttcccctgagtcaccaccagtcggtgctggaaatagtcggcaatggcgataaagactttgcagatattctctttccctctgaccaccatgcccggtttgacgaccagcgcggcgtcttctgcgtaataactcatcagggtatcgtaatcttcctgcgagatagcgcgatcgcaggcttcaatgaccgctttcagtgccaggtcagggtgatgcatctctggtgctccttgttgtgagcgatttttccgcctcggcgatcagggcatgcaggaaagactagcctgttgtcgtttatttttcattaatttgtcggcagctgccatcactccccgatacgttcggtggactgcctgcgtcagggggcgtctaaggcctgcgcaatatcggccgccaggcgggaaatctcagcgtcactcagacggcccagcgacaggcgtagcccgtgggagggcgtacggatgccaaacacctctccctcccggaccagccagccggcgcgggccaggcgtaaggcgtagggctggctcgccgctggcagcggcagccagaaattgaggccatcccctggcgtagcatggctgtagccgtaccgggccagcgccgccgccagtttctcattctgctggcgatagtgacgacgggtctccgtcatcgaggcgataaacgcctcgtcggtcaggcaggccagcgtcaggtcctgcagcagatggctgacccactggctgccggcgttaagccgcaggcgcagcgccgctgaagtagcggcatcgctggcgataaaggccagccgcaggtctggtccgagggtttttgacatcgagcgcaccagcgcccagcgttgggtgcttgcaggaagaggggagtgccatggcgtggccgacagcagggcaaaatggtcatcaacaatcgccagtacctgcggatagcgggctagcacctcccgcagggcatgcgcccgggtttccgtcaggctacagccggtaggattatgcgcgcgcggggttaagatcaccgcccgtgcgccgttgcgtaacgcctcctccaggccgtcaggatccatcccttcggcatccaccgccaccgggcagggggtaaaaccggcgtaacgcaccatattgatgctgctgagaaaacagggatcttccaccacaacgccgtcgccggggagcagcagagcgcacagcaggcgctccagggcgtctatcgccccgctggcgagattcaccgcaaagggaacggctatctctctggcaaaccacgcctcggcccattggccaagccgcggctcgatgggcgcattgccatacaggcggggcgtgcgggcaatctgtcccagatagcggggtaaatcaggcagtctggccggatcaggattgccgctggagatatcgttcagcggggtcgttgggtcacctccctccagcgccggcagtgtgtcccgcgctttaatggctgtaccgttgcgtccctgactgacggccagcccggaggtcaccagccgtttataggcggcggcgacagtgttgcgattcactgcaagctggctggcgagttcacgtaccggcggcagaacctctccgggctgcaacccgccgctctgcaccagatggcggatgttatcgaagatttcgctggcggtttttccggctaacattattgacctatgacaaaatggaatttagcataggacgaatcataatcagtgcgtgacccgctgtccagcggggggagaaaagatgggccagcaggatgatatacaatcagtgctctttcacgacaaaagccgggcgtcggaagtggatatcgtcgccgtgcagtcgcaggtagtctatggcagcgtcggcaacagcatcgcggttccggcgattaaacagcatggtctgcgcgtgctggcggtgccgacggtgctgttcagcaatacgccccattatgagacgttctatggcggcattattccggaagagtggtttgtcgggtatctgcaggcgctggaggagcgcgacgcgctgcgcgaactgcgtgcggtcaccaccggctatatgggcagcgctgtgcaaatcgaacgcctggcgcagtggctgacgcgcgtacgggcccgccatcccgggttgtgcattctcgtggatccggtcatcggcgatgtcgacagtggcatctatgtcaaggctgagatcccggacgcctatcgtcagcacctgctgccgctggcgcaagggatcacccccaatctgttcgaactggagacgctgagcggccagcgctgtcgcgatcggcaggaggcggtcgccgcggcgcgaagcctgctgtcggacaccctcaaatgggtggtgatcaccagcgcgccgggagaggccgattcgacgatcaatgtgctggtggtgacggccgatgcagtggaagtggtggttcacccgcgggtggagacagacttaaaaggaaccggcgatctgttctgcgcggagctggtgagcgggttgctttccggactggcgctgggggcagcgacgcaggctgctgcccagcgcgtgctggaggtgatgaactggactgccgcccaggggtgtgacgaattgatcctaccgccgctggagcaaagcagatgaaaagctatcggttagtgatccgccagcagggacgcattgttggtcattttgatacgacaggtgaggcggcgctggaggatgcctgcgtggcgcggtcgctgttcggcctggccggtggatatcagtgcgaactgctggtcgctgacagcgagcggcgaattctggagagcaccccggagggattgcgcgtcttgtcccgcgagaagtgctatcgaccggtaacctgcgcggtataaaaaaatggcgcctttcggcgccatttttatgcagcaagcattacttcttgatgcggattaccggggtttcacccacggtcacgctaccggacagtttgatcagctctttgatctcgtccatgttggagataaccaccggcgtcagagtcgacttggctttctcttccagcagcggcagatcaaattcgataaccggatcgccgactttcacgcgctgaccttcttcagcgatacgcttgaagccttcgcctttcagttcaacggtatcaataccgaagtgaacgaacagctcgatgccgctatcagattcaatagagaacgcgtggttggtttcgaaaattttaccaatggtaccgtctaccggcgcgaccattttgttgccagtcggtttgatggcaatcccatcgcccacaattttttccgcaaaaaccacatccggcacgtcttcaatgttgacgatctcaccggagaggggagcaacaatctcaatagttccggtgtctttcttgtcatcagaaaccagagatttcaatttatcaaacaaacccatgatcttctcctaagcagtaatttgggccgcgcatctcgtggattagcagattgttttttcttcaatgaacttgttaaccagcgtcattaactcgtccgttgtcggttgagcaagagcctgctctgctaatactttcgcatcttcgaagttcgtattacgaataatcttcttgatgcgcgggatggaaatggcgctcatagagaattcgtccagccccatacccagcaacagaagtgtagcacgttcatcgcccgcaagctcaccgcacatgccagtccatttaccttcagcgtgagaagcatcaataacttgcttaatcagattcagtacagacggtgacatcggctggtaaagatgtgaaatcatatcattaccacggtcaactgccagagtatattgcgttaaatcattggtgccgatactaaagaaatcaacttctttggccagatgacgagcaatggtcgccgcagccggtgtttccaccatcacgccgatctcaatggattcgtcaaatgctttaccttcgtcacgcagttcctgtttgtagatttcgatctctttcttcagcgcacgcacttcttcaacagagatgatcatcgggaacataatgcgcagcttaccgaaagcggaggcacgcaggatggcgcgaacctggtcgcgcaggatctctttacgatccatcgcaatacgcacggcacgccagccgaggaacgggttctcttctttcgggaagttcatgtacggcagctctttgtcgccgccgatatccatggtacggacgataacggcctgagagccacaggcctcagccaccgctttataagccgcaaactgttcttcttcagttggcagcgcgtcacggtccatgaacaggaattcggtacgatacaggcctacgccttcggcgccgttgcgctcagcaccttcgacatcgcgaacggtaccaatgttggcgcagacttcaacctgatggccgtcgagggtaatcgccggcagatctttcagtttcgccagttcggctttttcttccgcaacctgagcctgcagactacgcagcgcttcaatttgctcgttagacgggttgatcagaacctggttgttcaccgcgtcgagaatcagatagtcgccgtttttcacctgcgccgtgatgctgccggtgcccacgatggccggcaattccagggaacgcgccatgatagaggtgtgggaggtacgaccgcccgcatcggtgatgaaacccagcacttttttcagattcagctgtgcggtttcagacggggtcagatcggcggcgacgaggatgacttcatcctgaatcgcactcagatcgatgattgccagaccaaggatgttgcgcagcaggcgcttaccgatatcacgtacgtcagccgcacgttctttcaggtattcatcatccagctcttccagggcagtggcctgaccgtcgataacttcattggctgccgcgtcggcagtcatgtgcttatctttaatcagggctatgatttcctgctcaagctcctcatcttccagcagcataatatgcccttcgaagatggcttctttttcttcaccgaaagtttcaccagctttggttttgatgacctccagctgggcggaggccttggcgcggccgctcaggaaacgttcgacttcctgatcaaccttatcggcagaaattttcttccggtcgatgacaatttcatcttccttcagcagcaatgctttgccgaaggcgatacccggggatgctaaaatgcctgaaatcataaccctaccttacttgtgactgatatgaaaaagaacccgtgaacttactcgagttcagccatcagtttaaccagatgctcaacagctttctgctcatcttcgccttcagcggagagggtcactacggtgccctgggtcaggcccagagtctgcagtttgaacaggcttttggcgctggcgcttttgccgttggaggttacagtgatctcagaagtgaagcctttagcttctttaacaaactgagcagcagggcgggtgtgcagaccgttcggagcggtaatggtaacttcttgctggaacattatatttccccaacttataggtttagtgttgtggacctaaagtctagtctaacgactcgactttagcctgtattgttagcgccggcgttacgtttccggccttggcgtcggcagcgcctggcgctgcgaagacctgcgggccattgacgtctagcacgtcattaaacattatgccgcgaaaggaagacttgaaccaaatcataaaatcgattcagctggcggaaatcctcttctgaataatttcgcgcatcaaaataaatgtgctggttaaataccagaccctacgaggtgaatcaatgccaggaggggtaaaactttgacgtgtgccacaaaaaagcacccgaaaaggtgcttttttacacattatttacaagctggcactactgttgcagctctttctcagtgaagagatcggcgaacagcgcggtgcttaaataacgctcacctgaggaaggcaggataaccacaatattcttattggtaaaggcctcatcttcctgcagcttcagcgcggcggcaacggcggccccggaagagatacccgccaggatgccttcttcttccatcaggcggcgcgccgtggagatagcttcctcgttggtaatgccgatcactttgtcgaccagcttcagatccaggttgccaggaatgaagccggcgccgataccctgaattttgtgcggacccggcttgagctcttcccccgccagcgcctgggcgatcaccggggaatcggtcggttcaacggcgacggtgatcagatcttttttacctttggtgtttttgatatagcggctgacgccggtcagcgttccgccggtacctacgccggagataaacacatccacctgaccatcggtatcttcccagatttccgggccggtagtcttctcgtggatttccgggttagccgggttgctgaactgctgcagcagcaggaattgttccgggttgctggcgacaatctcttccgctttctggatagcgcctttcatgcctttggcgccttcggtcagcaccaggttggcgcccagggctttcagcagcttacgacgctcgatgctcatggtttccggcatggttagcgtcagtttgtagccgcgggccgccgccacgtaggcgagggcgataccggtgttgccgctggtcggctcgaccagttccacgccaggtttcagaacgccgcgcttttcagcatcccagatcatattggcgccgatacggcattttacgctaaagctcgggttacgagattctacctttgccaggatacggccattaccgatgcggttcagtcgtaccagcggcgtatgaccgatagtcagggagttgtcttcaaaaatcttactcatggcccgtccttaactgtatgaaatttgggggtacggcatcagcatacccgcttaaagaatatgcggaagtaaggatttagcatatctatatgcggaagggaaataatgataagcaagaaggaataagcgcgatataagggagcggcctttgccgcccccaagtgaaggtgttaccgctatttccagctggcgtgtctatcgcgatagcaatcgacccacatggcggtggcgccgcagatagccaccggaaggatcaccaggtttaacaccgggatcattgtgaacaggctggtgagcgccccaaactgcatattcatcactttgcgactgcgcagcgcttcgcgcatggttttgaagggaaccttgtgattatcaaagggataatcacagtattgaatcgccagcatccatgcgctgaacaggaaccagagtaccggggctaccgtctggccaacgccgggaataaagtagagcagcaacagcacgatggcgcgcggcagataccaggccagcttctgccactcacgcttcataatccgcggaatatctttcatgatgccaaagacgccgacgtccggcggggtagcgccggtcaggcgcgcttccagctgttccgccagcaggccgctgaacggcgcggctatccagttggcgagcgtcgaaaagaagtagccaaacaccagcaggattgatagcactaccaccggccacagcaggtagtttagccactgcagccagtccggcacatggctcatcagcgaggggatccagctgccgagacgggtaaacagccaccagaaggcagcgcccatcagcagcacgttaaccagtaaaggcaggaagacataacgccgtatgcccggcagcccgatgagtttccagccctgcgaaaaataataaacgccgctgcgcggggtcggtgcggatgatgaaaccatagccaggcattgctccttttttaacatccggtgtgaatgctcgcttattttatcgggtcgtcagacaataaccagttaggaaatgttcgaaaaaacagcaaaaagcacgatttagttcatctttatgtggtgaaagcgaccgacgcacttgcacttgaggtaatcggcaaatactcttagtgagtaaatgtttgccgtggtggcaaggtgttagaacaacagagaatataatgatgcaggatttgcgtctgatattaatcattgttggcgcgatcgccataatcgctttactggtacatggtttctggaccagccgtaaagaacgttcttcgatgtttcgcgatcgcccactgaaacgtatgaagtcgcgcgacgatgagtcggaaaacgacgactttgatgataatgttgaaggcgtaggagaagtccgcgttcatccggtgactcacgccccgcacggcgcgcatggggagcatgaagcccctcgtcaggcgccgcagcaccagtaccagccgccttacgagcgccagatgcagcagcctgcgcgtcctgaagaaccggttcgccagccgccgcagccgccgcgccaggccccggttccaccgcagcaacagcctgcgccgcatgcggctccgcagactggctggcaacagccgcaacctgcgcagccgcccgtacaaccgcaacaccagccgcagcctgttgtgcagcagcctgtcgcgccgcaaccggtgacgccgaccgtcgctcagccgcagccagccgccccgcagcagcctgcgccacagcctgttgccgcgtcgcagcccgccgtcgcggaaccgcagccggtagagccgcagcagcccgccgcgccgcagccgaaagagcgcaaagagacggtcattgtgatgaacgtcgccgcgcatcatggcgcccagcttaacggtgaagtgctgatcaacagtatccagcaggccggctttaagtttggtgaaatgaatattttccaccgccacctaagtccggacggcagcggtccggtgttgttcagtctggccaacatggtgaaaccgggaaccttcaatccggacagcatggcggatatgatgacccctggggtgactatctttatgcaggtcccttcctacggcgatgaactgcagaacttcaagctgatgctgcagtctgcgcagtatatcgctgacgaagtgggcggcgtggtgcttgacgatcagcgtcgcatgatgacgccgcaaaaactgcgtgaataccaggatcgtattcgcgaagtgaaagacgcgaacgcctgacgttccgcgttaactcaatcctttctcaacccccgcctgtcgggggttttttatcattgatggtgtgatatggaaccaatcgaacaacaactgactgaactgcgaaccacgcttcgccatcatgaatatctgtaccacgttatggacgcgccggaagtgccggatgcggaatatgaccgcctgatgcgcaagctgcgcgagctggagagccagcacccggagctgattaccccggattcgccaacacagagggtgggggcggcgccactcaccgcctttagccagatccgccatgaagtgccgatgctgtcgctggataacgtgtttgacgaagagagctttctcgccttcaacaagcgggtacaggatcgcctgaaaagcacagatcatcttacctactgctgcgagcttaagctcgacggcctcgcggtgagcattctctacgaaaacggcgtgttggtgcaggcggcaacccgcggcgacggcaccaccggcgaagatattacctctaacgtgcgaactattcgcgccatccccctcaagctgcatggcgagaatattcctgcacgccttgaggtacgtggggaagtgttcctcccgcaggccgggtttgaaaaaatcaatgaggaagctcgtcgcaccggcgggaaagtgtttgctaacccgcgtaatgcggcagcgggttcgctgcgccagctcgatccgcgcatcactgcgaagcgaccgcttactttcttctgctacggcgtgggcgtgctggagggcggcgagctgccggccagccactcggctcggttgctgcagttcaaagcatgggggctgccggtgagcgatcgcgtcaccctgtgccatacccccgaggaagtgcttacttactatcgtaaagtcgaggaagagcgtccccacctgggctttgacattgatggcgtggtgatcaaagtcgattcgctggcgctgcaggaacagctgggtttcgtcgcccgcgcgccgcgctgggccgtggcctttaagttcccggcacaggagcagatgaccttcgtccgggacgtggagttccaggtgggccgcaccggggcgattacgccggtggcgcgtctggagccggtccatgttgccggcgtgttggtgagcaatgccaccctgcataatgccgatgaaattgaacgcttaggcttgaaaatcggcgacaaggtggtgattcgccgggcaggcgatgtgatcccgcaggtggttaacgtggtgctttccgagcgtccggcggatgcccgggatgtcgtcttcccgacccactgtcctgtatgtcagtcagacgttgaacgggtggaaggcgaggcggtagcccgctgtacgggcggcctgatctgcggcgcgcagcgcaaagagtcgctcaagcacttcgtctcccgtcgcgcgctcgacgttgacggcatgggcgacaagatcatcgaccagctggtggagaaagagtacgtccataccccggcggatctgttccggctgacggcggggaaactgaccgggctggatcggatggggccgaagtccgcgcaaaacgtagtcaacgccctcgagaaagccaaagagacgaccttcgcacgcttcctctacgccttaggtattcgcgaggtaggagaagcgacggcggcgggcctggcggcgcatttcggcactctcgaagccctggagcaggcttccattgaggagctacagaaagtccctgatgtcggcatcgtcgtcgctacccataccttcaacttctttgccgaagagagcaaccgcgatgtcattgcgcaactgctggcggagggggttcgctggcctgcgccggtggtggtgaaggcggaagagattgatagcccgtttgcaggcaaaaccgtggtccttaccggcagcctcagccagctgtcgcgcgatgacgccaaagcgcgtctggtggcgctgggggcgaaggtggcaggcagcgtgtcgaagaaaaccgacctggtgattgccggcgaagcggcggggtctaagctggcgaaagcgcaggagctgggcatcgaggtgattgacgaagccgaaatgatgcgtctgctgggagaataacgtggataaagcgcagctggtcgagatagccaataccgaaatgccgttcggtaaatacaagggacgtcgcttaatcgatgtcccggaagagtatttattgtggttcgcgcgtaaggatcaattccctgccgggcatcttggcgagctgatggcgttgaccctgctgattaaaactgaggggctgagcgatcaggtccagcccctgaagaaagcgcgttaggctttggccgcgttggccttttcctcagcgagacgcgcatcggtttgctgcttgtagcgccgcgccagcaccgcgcagaccatcagctggatttggtggaagatcatcaacggcagcaccatgatgccgaggatggaggtcgggaagagaatattggccatcggaatgccgttggccaggctctttttcgaaccgcagaagacgatggtaatctcatcggctttgttaaagccgcagcggcgggcgacaaagacgttgaccgcgatgacgatggccagcagcaccaggctgaccaccacgataaacagcaacgatcccagaccgactttatgccagatgccattcaccaccgcctcgctaaaggcggagtaaaccaccaacagaatcgaggtctggtcggtcttaccaatccacttcttatgcttcgccacccagtcgccaatccacggccgcgataagtgaccgagcacgaaaggcagcagcagctgcagcataattttaccgacctgctccagactgccgcctgcgccgtgaaggttcatcaggacccccaccagtagcggggaaacaaagatccccagcaggctggaggccgaggctgagcaaaccgcagccgcgacgttgcccccggccagcgaagtaaaggcgatagcggattgcacggtggccggcagaatgcacagatagataaagccgctgtagagcatcggatcgacattcaccggcgcccaccaggcaaacagaaccccgagtagcgggaagagaataaaggtgctgcacatcacccagagatgcaaacgccagtggctgccgccggcgataatcgcctcccgggagagtttagcgccatgcataaagaacagcagcgcgatggcggcggtggtcagatgttcaaagaaggggacgaaagcgccacgggccgggaagaatgaggccagcaggacaacggtgattagcgttgccgtaaacggatcgagaatacggaaaagtttcataaacgctcctgaaaagagatgcgctattgtgctttttttcatttgagaaataaaattgatttattgcatctattcatgaataaaaaagatgaattactctctgcgtcagttaaaagtatttgtcaccgtcgcccgggccagcagcttcagccgggcaggggagatgattggcttaagtcagtcggccgtcagccatagcgtcaaggagctggagcatcagaccggcgtccgtctgctcgaccgtactactcgcgaagtggtgctcaccgaggcgggtcagcagctggcgggcaggctggaacgtttgcttgatgagttgacgattaccctgcgtgacgccgggcgggtaggccagcagctgagcggcaccgtcaaggtcgccgccagtcagacgatttccgcccaccttattccgcagtgtattgctcacagcaatcgtcgttatcccgatatcgattttgtgctgcacgatcggccccagcagtgggtgctggagagtatccgccagggggaagtggattttggcatcgtgattgatccgggcccggcggcagaccttcagtgtgaagtggttctggcggaaccatttttgctgctctgccgggaggatcatccttttgccagcctgacagaagtgccgtggcaggcgctgcaggatgaaaggctaatcctgcaggattatgcgtccggcagccgcccgctgatcgatgcggccctcagcagactggctatccgggcgaacatcgtccaggagattggccacccggcaacgctgtttccgatggtagaatcgggaattggcatcagcgttctgccggcgctggcgctaccgttaccgcaggggagccatctgacggtgaaacggctgactccggtgatggagcggcagctgatgctggcatgcaggaaaaatcgctcgctgtcgaccgccgctcaggcgttatgggaaattgtgcgtgaagaaggggagaatttaaccgccgccagggttgaagatccgctatatcagcgctgacaggggggattgctgcggagggtctcgtggcagggccatgttccgcgcatagcaaaaaggcgcctttagggcgcctttttacattggtgggtcgtgcaggattcgaacctgcgaccaattgattaaaagtcaactgctctaccaactgagctaacgacccgaagtggtgggtgatgacgggatcgaaccgccgaccccctccttgtaagggaggtgctctcccagctgagctaatcacccacttcggtacttcacattttgacagaaaatccagctggcgagaaagtggtgggtgatgacgggatcgaaccgccgaccccctccttgtaagggaggtgctctcccagctgagctaatcacccacttctcaattttctgttctacacggcggagactacgttaagtagtggtgggtgatgacgggatcgaaccgccgaccccctccttgtaagggaggtgctctcccagctgagctaatcacccccgctgtgtggagtcgcattatagggagagttgaaaatgagtcaacgccttttctaaagaattcgttcgttcgtcgtaaaattaaacaaagcgatcgcgaaaccggcgccatagcatgatttataaacaaaaatggcaaaccgtgacgttccgatgggaacaacattgaggaatcagcccacggtgttagaatattgacccataatttccaccggacattgccggctatcggcatctttattaaacgtaaggccaattcatgaaaatcaaaactcgcttcgcgccaagcccaaccggctatctgcacgttggcggtgcgcgtactgctctctattcctggctttttgcccgtaaccacggcggtgagtttgtgctgcgtattgaagacaccgatctcgaacgctccaccccggaagcaattgaagccatcatggatggcatgaactggctgaatctgcaatgggacgaaggcccctatttccagaccaaacgtttcgatcgttataacaacgtaatcgatgagatgctggaagccggtaccgcttacaaatgctattgctcgaaagaacgtctggaagcgctgcgcgaagagcagatggcgaagggtgagaagccgcgttacgatggccgctgccgccatagccacgagcaccatgctgacgatgagccgtgcgtcgtgcgtttcgccaacccgcaggaaggttcggttatttttgacgatcagatccgcggacctatcgagttcagcaaccaggaactggacgatctgatcattcgccgtaccgatggttccccgacctataacttctgcgtggtggtagatgactgggatatggcgatcactcacgtgatccgcggcgaagatcatatcaacaacacgccgcgccagatcaacatcctcaaagcgctgaatgcgccggtgccggtttatgcgcacgtgtcgatgatcaacggcgatgacggtaaaaaactttccaagcgccacggcgcagtgagcgtgatgcagtatcgcgacgacggctacctgccggaagcgctactcaactatctggtgcgcctgggctggtctcatggcgatcaggagattttcactcgcgaagagatgattgagttcttttcgctgggcgcggtgagcaaatccgccagtgcctttaacaccgataaactgctgtggttaaaccatcactatatcaataccctgccggcggagtatgtggcaacgtatctgcagtggcatatcgagcaggaaaatatcgacactcgcaacggcccgcagctggctgagctggtgaaactgctgggcgagcgttgcaagacgctgaaagagatggcccagagctgccgctacttctatgaagagttctctgaattcgatgtcgacgccgcgaaaaaacatctgcgtccagtggcgcgtcagccgctggaagtggttcgcgataagctggcggcgattagcgactggacggcggaaaacgtccatcacgcgattcaggcaactgctgatgagcgggaggtggggatgggtaaagtcggtatgccgctgcgcgtggcggttaccggggcagggcaatctcctgcgctagacgttactgtccatgctatcggtaaatcccgtagcgtagatcgtatcaataaagcgctggcttttatcgctgaacgcgaaggccaggcgtcctgacggcgacgcagctgaaacaacggcaggttaccctgccgttttttttgcctgttattccggactggcgatgccgaggcgggcaagaaaaccgctaatcccttcccgggccagcagatcgcggagctgcagctgttctgccggagtcatcagctgtagggtttccgtgatttgccgccagatcgcgtctgcctcattgaccaggtatgcacctggcgattccgcgagatgattgtcggtaagcagatggcgtctggcagggatgttggtcagaaactcgcgtaccggttggtcgataaccaccagtcgcgctcgcccccctttaacgccgggtattgcttcggtgcgccattgtttctcgcgaacccagcgattgatcgtttgtctggccagccccaggcagtcggcaagctctgcgggcgtcattttatctttcagtttcatcatggtttaccgatcgcggatccctaaccgaagcagtaacccggtgatcccctcgcgcagcaacaaagacataagctgcttctgctcgctgggggtgagttctttactgagggtcagcagcagcgattccagatcgctatcatggggagaatagatgccgggcgtctccgccacgcgctgggcgctgcggataaactccctgacttgctcattgacatggaccaggcgcgctttgccgccctggacgccaggtcgcggagaggtttgccagccttctttccgcacccacttattgatagtttgccgactgtagccggttagatgggcaatttcttcaggtgtcattcgttccttgagcatactatttcctgagtaaatgtatgggaattagctgcccatgttatagcatccttttacgtgaaaaggtgacctgtttaacttctgactgcgataaggctcgcaatgtcagcaagttgcctgctttttcagcgattgaatcgggaaggataattttgccgttgacacctgagcgaggaattcatattatgccgcccgtcaacacgacacgctttacgttacggggctatagctcagctgggagagcgcttgcatggcatgcaagaggtcagcggttcgatcccgcttagctccaccaaattctgcacccagcggatttggttcgtaaagaagtcctgtggggctatagctcagctgggagagcgcttgcatggcatgcaagaggtcagcggttcgatcccgcttagctccaccaaaattcagaaccctcgcttccgcgggggtttttgtttttagcgggtttcatgtaaagcactttctggttacgtcagttaatctccagcaattaaaatcgaaagtaatttcagactttttcctgataattcgccttgcctgccctaaataagcaacataacatttcccccattaaacgtgatgaggtttctggagttttaattaacaataatgcttgataaaattaacattaatatcaaaaaaactctattggcctttatcatttgtttagtcgctattccgctggctcgttttatttcaccgcaaacgataattgacggcaaccttatttatattgcctggctgccaatcagcgtgatgttttctgttatttttatctttggccgctatgcaattgcgccattaattctcgcgtttgccatcaccaatagttttctcattaaattaacgctgccgcaggcgtttatcttacttttttgtcaactgttcgccgtgtttgtctcctgcgctattctgcgactgttggtggggaagcgctggcgctgcggtccaacggcaaagcatatgggggcgcggatcttctggggcggcttcttcgcgccggtgctcctgaaaatcaccatgtatctcgccggacaatattttgcgtttccattagctattaccagttactttggtagtatgccgttgatttatactgtaatagatatccaaagtttaatcagtgcggcattaatttttacgacgtttctttattatccaatgcggatgattatcagtccgcgctacgcccgacgtttctggcagcaggaatgtttaccgtggctggcaccgcaatatcgctcctttaccctatattggtttatcgcgttggcggtgatattaacgctattgtgtgcgccgtatcagtctgaatttattgccggttatttagttccggttatttttattgtctactttatcggtatcagtcgaataggccatgcgctattgcgtatttcatggtctgtctcggcctttttgctggtggtatataacaaaaactttctccagggggtgcaaagcgagtattcactctcctttgtgctgtcggttctgatctcctttactatctgtttgttttatatggccgacatctatgcccgcagcgaccgcaacaaacgccgctggcgtagccaggcggaagaggatccgctgaccggcttgcctaacctgcgcgcgctggagagccatttacagagctgtcctcagcaggctatctgcagcctgcgtattgataatctcgactttctcagtcggcattatggtctgatgatgggggtggactgtaaacggcagattattcgggcgctgcaaccgctgctgggagcggcggataaagtcttccaggtaccgggcagcgaactgatcctcgtgcttgatggaccggagccgtcgtcccgcttgaatcatatggtcgcggtcctcaaccacaaaaagttcagctggcacaatcagccgctggatttggagtttggcgcggcctggggccgcgatgacggccagggtgagggactttaccagatgctgggccagctaagctggctttccgaacaggcgggcagtgaacgtcgggtgctggcgctggacgaggagcaggatctggtggtggatcaaactaccgagcaggtgcgcctcctaatgcgcgtcaagcaagtgctcaaagatcgcgcgctgatgctctatgcgcaaccgattcagaatccggagggggagggttatcatgagatcctcacgcgcatgcgctgtggcgatagcgtcattatgcccgaccgattcattccgctgattgtgcagtttaacctcagccaacgttttgacatgctggtgctggagaccttgttcagtatgctccataagcatcccggccagcgattctcggtcaacctgctgcctgcaactctgatgcaaaagaacagcgcagggcagattatcgcgctgtttcaacgctatagcgtctcgccagaacttataactattgaggtgaccgaagagcaggccttctctaatgcggacaccagtcggcaaaatcttgaagcgttgcgcgcgtttggctgcgccatcgctattgatgactttggcaccggctatgcgaactatgaacgtctgaaacatctacaggccgatatcattaagattgacggctgctttgtccgcgacatcctcacggacccgctggacgccatcatggtgaaatcgattgtcgagatggcgcgggcgaaacagatgagcgtggtggcggaatatgtcgaaagcgaaccgcaaaaagcgcgcttgctggagctgggcgtgaattatctgcagggttatctgatcggtaaaccacagccgctgggtgaatgtcgggcaaaaaaaagccgggcattgcccggctcagatgactgacgtctgttacagaaccagcgccgcaatcgaggcggacagcacgctaaccagcgtggagccgtacaccagcttcagaccgaagcgagaaactacgttgccctgttcttcgttcagacctttgatcgccccggcaataataccgatagatgagaagttggcgaaggagaccaggaagatagagataatgccttccgcgcgcggggagagcgtcgaggcaattttctgcagatccatcatggcgacgaattcattggagaccagtttggtagccataatactgcccacctgcagcgcttcgcttgccggcacacccatcacccaggcgaccgggtagaagatatagccgaggataccctggaaggaaatgctatagccgaaccaaccggtcacggtggcgaacagggcattcagcgccgagatcagcgcgatgaagccgatcaacatcgccgccacgataatcgcgactttaaaacctgccagaatatactcgcccagcatctcgaagaagctctgaccttcgtgcagattcgacatctgcagattttcttcgctctcttccacgcggtaagggttaattaatgacagaacgataaaggtgctgaacatgttgagcaccagcgccgcaacgacatactttggctgcagcatggtcatgtaagcgcctacgatggacatggacacggtggacatcgccgtcgccgccatggtgtacatgcggttgcgcgacattttgccgagaatatctttatacgcgataaagttttccgactggccgaggatcaacgagctcacggcgttgaaggactccagcttgcccatgccgttaactttcgacaggacggtaccgatcgcgcgaatgacaatcggcaggatacgaatatgctgcaaaatgccgatcaaagccgaaatgaagactatagggcacaaaactttgaggaagaagaaggccaggcctttatcgttcatgccgccgaacacgaagtttgtcccttcgttggcaaacccgaggagtttttcaaacatctcggaaaatcctttcacaaaacccagaccaatatcggagttgaggaagaaccaggccagcaggacttcaatgacaagcagttgaacaacataacgaatacggatcttttggcggtcatggctgaccaacagggccagtatagccaccacaacgatcgcgaggacaaaatgcaagacgcggtccatagttgctccaaatatgaggcaggttaaatttccgtgcacattctatgcaacggctttaaagaaaacgagatcaattgcacactattgcaaggaactgtgaccaatggcaaaaatagtgatccaacatccacttttgttatgttacgtaaaggttttaaaagttgcattcttgtactactcttaatagcgggctggatctcgttttctgacgcccgtatttcatttccggccagctattgttcccttctatcacagcaatcattatctccattctaaatgaacttgataatcattcgcattttgatagcatgaaacatagcaaaggctatatttccagaggcagaagatgactagcagtcgcgttgagaatagcagtagtcgcgccgcgcgcaaggtgaagctcgccttaatgggcccggctttcgtcgctgccattggctatatcgatccgggtaatttcgccactaacattcaggccggcgccagctttggctaccagctgctgtgggtcgtggtgtgggctaacctgatggcgatgctgatccaggtgctttctgccaaactgggcattgccaccggcaaaaacctggccgagcagatccgcgaccattacccgcgtcctgttgtctggttttactgggtacaggcggaaattatcgctatggccaccgatctggctgaatttatcggcgccgcgattggctttaagctggtgctcggcgtgtcgcttctgcagggggcggtgctgaccggggtggcgacttttctgatcctgatgctgcagcggcgcggacaaaaaccactggagaaggtgatcggtggattgttgctgtttgtcgccgtggcctatgtcgtggagttgatcttttcccagcccgcgctggctcctctgacgaaagggctggtgatccccacgctgcccaacggggaggcggtattcctggccgccggggtactgggtgcgacaattatgccgcacgtcatttacttacactcatcgctgactcagcatctgcatggcggaacgcgaaaagaacgctataacgcgacccgctgggatgtggcgatcgccatgaccattgccggattcgtcaatctggcgatgatggcgaccgctgcggcggcattccactttaatggccataccggcgtcgccgatctcgatcaggcctacatgacgctggagccgctgctgagccacgcggcggcgaccatctttggcctcagcctgattgccgccggtttatcgtcgaccgtggtgggcactctggcaggtcaggtcgttatgcaggggtttatccgctttcatattccgctgtggtttcgccgggcgatcaccatgctgccgtcgtttgtcgtcattctgctggggctggatcctacgcgcatcctggtaatgagtcaggtgttgctcagctttggcattgcgcttgccctggtgccgctgctgatatttaccagcaatgcgaagctgatgggggacctggtgaatacccgttgggtgagaggcatcggctgggcgatagtcgctattgtggtgagcctgaacggctggttaatagtggggtcgctgctcggggtggattaattgattcctgatgctgaataaagtaaaggggagccgatgggctccccttttcgtttgttagtgatggccatgtccatgaccgtgaccgcgcccacccgggccgcgtccccagccgccgcggtggtcatcgcggtcgttccagccagcacgatagccgcgctcccaggctttatctctgcctttgtaccagcctttgtgccagccgttgtcatgacgatgccaacggttatcacgccattcatagtgacgacgccagtaatcacggtcgcgccagctgccaccgtcccagtagttaccgtaattgtcacgatcgcctatttgtaattttaccgacggcagcagggtgatttcaccagcgttagcgaccagtggccctgcggccagcagtactgctgccagaatcagtgacctgaacatactcttctccttcacgatcggggccgtaagcggcctgttaacctgatattacgggccggtaaagacccaccgcatcggacgaactccgaaagcgcaggaaagagcactttttgctaaagtaacatttgctttacagcgcaaggatggcgtcgatggccgcgccctcctcggtggtgaaatggcgattctgcagcatgccgacggcatcatccagttgcgcggttttgctggcgccgatcagcaccgaggtgactttctcttcgcgcaacacccaggccagcgccatctgcgacagcttctgcccacgcgcttccgcctgcctgttaagctgacgaattttttctaatcgggcaggagtcagttgttccggctgcagaaaacgactgctgctggcggcgcgcgagtcggccggaatgccgttgagatagcggtcggtaagttgcccgccggccagcggtgaaaacgctatgcttccaatcccttccgtctgcagaaaatccagcagtccttcttccacgccgcgttcgaacatcgagtagcgaggctggtggatgatgcagggggtgccgaggtcgttaaggatcttcaccgcctcccgcgcctgggccagaggatagttggagatcccgacatatagcgctttaccctgacgaaccagatgatcgagcgcacgcatcgtttccatcagcggcgtctgtggatcaggccggtgatggtaaaaaatatcgacgtattccagccccatgcgtttaaggctctggttaagactggctaccagatattttcgcgatccccagtcgccgtaagggccgtcccacatcgtgtaacctgctttagtggagatgattaactcatcgcgataaggcaggagcgactctttcaggatgcggccaaagttgctttccgccgagcccggcggcggcccatagttgttggccaaatcgaaatgggttataccgaggtcaaaagcgtgcaggagcatctgccggctggtttccactcgcgtttcatcgccaaagttatgccacaggccaagggaaatggccggtagttgcagaccgctgcggccgcagcgacggtactccatcgtttgatatcgcgtggtgcttgcctggtaaaccattcttcctccgccgacaaaacagggtgtgtatacgtttacactaaacaatgttctgcgtggagtacactgctttttctgcgtaattattgctttacactgccattatcacctcccatctggacaggcggatcgcttattcaatactcaaattacacctgcactaaaatgaggataatggatatgcaaccgacctacactattggggattatctgctggatcgccttgtcgactgcggtattgaccgcttgttcggcgtgccgggagattacaacttacagtttctcgatcgcgtcatcgcgcacagcgccttggggtgggtcggctgcgccaacgagctgaatgcggcatatgccgctgacggctatgcgcgcatcaaaggggccggtgcgctgctgaccacctacggcgtcggcgaattgagcgcgctgaacggcattgcgggtagctatgcggaacatattccggtattgcatattgtcggtgcgccctctaccggcgcccagcagcgcggcgaactgctgcaccataccctcggcgatggcgattttcgccatttcgcccgcatgagcgagcagatcacctgtagccaggcgctgctgaccgccggcaacgcctgccatgaaatcgaccgtgtgctgcgcgatatgttgacgcatcatcgccccggctatttgatgctgccagccgatgtcgccagagcggcagcgattgccccagcccagcgcttgctggtggagcccgctccggcggatgaaaaccagcttgccgggttctgcgaacatgccagccgcctgctgcggggcagccgacgcatttccctgctggcggacttcctggcgcaacgttatggcctgcagaagacgctccgggagtgggtggcgaaaacgcctgtcgcccatgcgacgatgctcatgggcaagggattgtttgatgagcagcagagcgggtttgtcggcacctacagcgggattgccagcgcgccgcagacccgggaggcgattgaaaacgccgacaccatcatctgcattggcacgcgcttcaccgacaccatcaccgcaggatttacccaacatctggcgcgggaaaagactattgagatccagcccttcgccgtcagggtgggcgatcactggttcagcggggtgccgatggataaggctttggccgcgctgatgacgctttccgccccgctggcggcggagtgggctacgcctcaggtcgtggcgccggaggctgaggagggcgctgaaggcgagttgacccagaaaaatttctgggcgacggtgcagggcgccctgcgtccgggggatattattctcgccgatcaggggacggccgcctttggtattgcggctctgaagctgccctctgaagcatcgctgatcgtccagccgctgtggggctcgattggttttactctcccggccgcctatggcgcacaaaccgcggcggcggagcggcgggtggtgctaattgtcggcgatggcgcggcccaactgaccattcaggagatgggctccatgctgcgtgataagcaaaagccgcttattctgctgctgaataacgaagggtataccgtggaacgggcgattcatggtccagagcagcgctacaatgacatcgctctgtgggactggcagcggctgccggaagccttcgcccctgacgttgcttcgcgctgccggcgggtcactcagacgtctgaactgcgggaggcgatgacggagagcatcacctccgataccctcaccctggtagaagtgatgctgccgaaaatggatatccccgatttcctgcgcgcggtgacgcaggcccttgaggagcgaaacagccgcgtttaatcggtatgccgtttggcaatcatcaacggtctcccggccagcagcagccaggccgggagcatcaccatacacaacagcggcagcaaagtcgtatccgggaccaccacggcggccataaacaggctcaaccagccgtcgcgagtgacgaccagcaccatgccgaggatcgcgcaggaaacggtgattgccgccggcaccgcgtcaacatgagcatgcagcatcagccccagcgctaccccgacgaacaccgccgggaaaattcgcccgccgcgaaagccgctggctgaggcaagaaccagggctgccagtttgaccagcgcgataagcagaaaatccgcggcggttagcgtctggctgaaggccagctgctgcatctcatccagccctttaaagagcgttaagggcccgcctatcgtccccacgatccccagcagcagcccgccgatgccgagggtcaggattggatttttcaaccgatgcatcagggcatgcagtcgcggcagacaccagacggccaccatgccgacggcgatagcgatcagggcgacgataatgccgctgagaatatcaacgaagcgcatctgaccatagtgcgggatcggcagcgaaaaatggggatggaaaaacagacccgtcgtcaacgcgccggcggcggcggcgaggaggggagcaaagaggcgatcccacagtggcgtatcgttgctgctattgagggtttgcgaaaaaatcagcgcggcggcaaccggggtaccgaagagggcgccgatggtgcctgaggccgcgaggatggtccagtccagcgagctgacgcgcggaaacagtcgggagccgacggcgacagccagcgcgatattcaccaccataatcggatgctccgggccgaggctgacgccgccggcgaggccgaggatcagcgcggccaggagtccgggcagcgcgccggtggcaatgggagcgccgattaacgactcggtcgctggatccggcccggcgtgcccggggctgtaacgaatgaccagacccaccgcgatccctgtcgccgtcagcatggcgatgatccacagcgggctgtcggcgctcacccccaactgcgcgggcagattgctccacagcacgcgctgcagcagcgcggcaaccttcatcgccacgatcaggatcaggctgcaggcgatacctatcaggatggccggcaccgacaggatcagcattgttctggcgcgaggatggagcatggaaatgtccttgtaaaagtgctggagcactactttgccttcgtcagcggagaccgtcgatgcaaatggtgctgaaacgataaagttaaggtgacatctgatatccggcgcgtcctttacaggctaccttgcatagattacaaactaaatgtgacctgtgtcgctaaacaaggggcgtctgcgcgttggacgttgttgttaagccgccatgaatttacagtgtgccaaaagatttattttgactttagcggagccgtaacggaatgacaaaatttgctttagtaggagatgtcggggggaccaacgcccgcctggcgctatgtgatctggcgagtggagagatctctcgtgcaaagacctattccgggctcgattaccccagtctggaggcagtggtgcgcgtctatctcgaggagcaccaggtaacggtcaacgaaggttgtattgccatcgcatgcccgattaccggcgactgggtggcgatgaccaaccatacctgggctttctctatcgccgaaatgaagcgcaacctcggctttgcccatctggagataattaacgattttaccgctgtttcaatggccattccgatgctgaaagctgagcaccttattcagtttggcggcagtgcgccggtagcgggcaaaccgatcgccgtttatggcgccgggaccgggctcggcgtggcgcatctggtccacgttgataagcgttgggtcagcctgccgggcgaaggcggtcatgttgattttgccccgaacagcgaagaagaagggatcattctggaagagctacgcgccgagctggggcatgtttccgcagaacgcgtgctctcaggtcccgggctggtcaacctgtatcgcgcgattgtcaaatcggacggccgactgccggagaacctgcagccgcgtgaggtgaccgagcgagcgctggcggacagctgcaccgactgtcgtcgggcgctgtcgctgttctgcgtcattatgggacgcttcggcggtaacctggcgctgaccctcgggacgtttggcggggtgtatatcgccggcggcatcgtgccgcgcttcctggagttctttaaagcctctggtttccgcggcggttttgaagacaaaggccgttttaaagcttatgttcaggatatcccggtttacctgattgtgcatgataacccaggcctgctgggctccggcgcgcatctgcgtcagacgctgggccaggtgctttaagcattcttctcccgggctaccgtcgtagcccggatggcggtgctttccgctctctacagattcatcagctggcgaaactctttcactttactgcgactgaccggaacctgaaactccaggtcacgcaggcgcagcacataggtgttgttgaaccacggctcaatttcccgaattttgctgagatttacgcaatacgagcggtggcagcggaagaaatgcgcggtgggcagtttgctgcagaattcagtaatgttcatcggcatgacgaatgactcccggcgggtatagacgaatgtcatcttttcatgcgcctcggcataataaatatcatgaatactggtgacgatgatccgctcatctttgatcagattgatggtgtcgttttcccgtggcgctgcgctggctaatcctgaagcagcgttattttgctgctgccaggcggtggtcagcttttgcagcatattgatgatgcgcgactcctggtaaggtttcaggatgtagtcaaaggcttccagctcaaaggcttccaccgcatgttctttccacgcggtgataaagacgataaaaggtttatgggcaaactggctgatgttttgcgccagcagaaccccgtcgagcgacggaatattgatatcgagaaagatggcgtcgaccttgttgtgctggagaaatttcagcacgtccaggccgtcgtcaaagctgccgacgatctccatctggctatgggtgttaataagccaggagagctcctgctgggccagaaactcatcctccacaatgataactttcatcttttctccgctcatgacaacagcgactccgtcagcgcctgcggcgtagagttattggggacataaaaggcgatttcggttcccggcgtcagattgcggatatgcaaaccctcgccgtagagaagtttcacccgatgatgcacattgagcaggccgattttgttacccggcatctcatcggcttccacgcgggcgaccacggcgggatcgataccgttgcccgtatcgcgaacgctgatgcgtacccgattgccgcactcgttaatgccgatcgtcaccacgcctttgcctttacagggttgaataccgtgaacgatggcattttccaccagcggctggataagcaggctcgggatcacgcagctgacgtcgtcgtcaatatcgtagatgaccgtcagcttgtcgccgaatcgcgcctgttcaatagcgatataatctttgatctgatacagctctcgtttgatatcaatctgctcatcgtcttttaattcgatgttatagcgcaggtagcgcgacagattaaaaatgagctggcgcgcggtgtccggattaaggcgaatcgaggaggagatcgcgttcagcgcattaaataaaaaatgcgggttaattttgctttgcagggcgcgcagctccgctttgttggccatctcccgcagctgttcggcgcgggagacttccagctgggtggagattatttgcgacaggccaatcgccatctcctgcagcgtcgaagtgatgcgatgggcgtggcagtaatagatttttagcgtgccggtcaccacccctttttcccacagcgggatcaccatcaaggagtggatctccggggtgcggtgggcttcgtcattgttttttatgatgattttcccataacgaatcgcctgccgggtggtggggctaatcatatcgtcgtggcgttgatagttggcttcaccgacgcccacgtaggccagcacgtgctcggtattggtgatcgccaccgcgtcggcggtaatgtcgcggcggataatctcgcaaacctggcgcagagaatcgctgttaacgtgtcgaaacagcggcagggttttgttggcgatatcgagcgccagtttcgcctgccgcgccgcgctggcctccttttccccttcaacgctctgcaccagcagcacgataaagccgatgcagacgctgccgaggatcatcgggataccaattttcgaaacaatatctacgccgagactcagggaaggcgcccagaccaccaccaggatcatggtcagagtttcacacatcatccccgccagaatgccgattttccaccgttgttcgcgggccactttacgattaatcaaccccgacagcaggccggcgacaatgctggtgataaagcagggcaccgcggtcacgccgtcgatatcaatcaaatagcggtgcacgccggcaatcgccccgacaatcgcgcccacccagggaccaaacaggatcccaccggacatcacggcgataatgcgcacgttcaccagggacccctcaaccgggacgccggaccaggtactaaatagcgcgaacagcgagaaaatggctgtcaccgccagcagctctttcggagtatgggccgacttatgcaacagttcgcggaacaggcgcaggcgaataaggaaaaagaggcaaataagcatcagggccgcacgatcatagaccgccagcatcatagtaaagatttcgtgcatgggtgcgccgcgtcagtggccagaaagggacatgataaaaaacctgacggcagaagaccagccgtggaaccataaagcggaaaagtcgcactttttaatggggattaattaaaaagcatcgcgatagcggcggtcttcgccattaacgataatattctgtgttaagaaagatatcagtgtgttaccacctttatacaacccgggattattccgccaatgaactgccgcatttagcgcagtcgatacccgttttatatgccagggaatattttttaacgggcctctcgacaacatgaattttttcaggttattttctaaacgagccgcaacagcggcagcgtcgctcggacggtccgggcgctaacgttaattagaggaacctatggctgaatccagtcctgaacgccgttttacgcgtatcgatcgtctccctccgtacgtttttaacattactgctgaactgaaaatggctgcgcgtcggcgcggcgaagatattatcgatttcagtatgggtaatcccgatggcgcgacaccgccgcatatcgtggaaaaactctgcaccgttgctcaacggcctgacacccatggttactctacctcgcgggggatcccgcgcctgcgtcgcgccatttcacgctggtatgaagaacgctataacgtcgatatcgatccggaatcggaagcgatcgtcaccattggttcgaaagaggggctggcgcacctgatgctggcgacgctggatcatggcgacaccgtactggtgccgaaccccagctatccgattcatatctatggtgcggtaatcgccggggcgcaggtgcgctcagtgccgctggtggaaggggtggatttctttaacgagctggaacgcgccatccgcgagagctatccgaagccgaagatgatgatccttggctttccctcaaatccgaccgcgcagtgcgtcgaactggatttctttgaaaaggttgtcgctctggcgaagcagtatgacattctggtcgtccacgatctggcctatgccgatatcgtgtatgacggctggaaagcgccctccatcatgcaggtgtccggcgcgcgggatgtcgccgtcgagttctttaccctgtcgaaaagctataacatggccggctggcgcattggctttatggtgggtaataagactttggtgaatgccctcgctcgtatcaaaagctatcatgactacgggacttttactccgctgcaggtggcggcgatagctgcgctggagggcgatcagcagtgcgtgcgcgatattgccgaacagtataagcgccgtcgcgatgtgctggtcaaagggcttcatgaggccggctggatggtggagtgtccgaaagcgtctatgtacgtgtgggcgaaaataccggaaccttacgccgccatggggtcgctggagtttgcgaaaaagctgcttaatgaagcgaaggtttgcgtctcgccggggattggctttggcgactatggtgatacccacgtccgcttcgcgctgatcgagaaccgggaccgtacgcgccaggcgatccgcggtatcaaggcgatgttccgcgcggatggtctgctggcctccgcgagctagcgctgcgggcagcacggcaaaataaaaacgggagcatgaaggctcccgttttttttgacaccgctgcagtctagatcatcagggcaaaagtaccggcccaaacgatgaccataaaagagaggcccataaaaaagtatttcacgactcatcactccacgcgcttgtgcgacgttcaaatgaattaattgttctgtttttcaaggactgtcgccagtgtaacttcaccctgcagcagcccgtaattctgtgcgtttagtgctccagatggcgctaatgtacgcctaaaaaatcagggaaacaagaggcatttttttattaatttttagttacttacgagtgtcgtgattcggcgacacattaatttcacagggtaataaatttagcgccagcgacgcgaaggaaacgggttttagcgatggggcgggcggagaaggccaacgagagcgcgcggcattatctttgccacgcgccgccgtcggttcagggcaggtctgaggcgcgctgtcgccactcggccgggtagtgtgccgggataaagcgcagcgtcagcgccatgagtagcaggacgcagatcgcatgccaggaccagtcaagcgtgtagttcccgctcaggctacgcagcaggcctgaaagccagggcgacagaccggcgatgataaatccgatcccctgcataaaggctaccagcctgccggccaccgccggttgtccggcgtgatccagcgccagcaccaggcacagaggaaacgcgccgcccaatcccacgccgcaggcaatggcccagagcgcagagaaatgctctggcagccagataaagccgcagaagccaatcagctgtagcgccagcgctagcagaagaagctggcgccgatcctcctggcgagccagcgccgggagcagcagcgcgccggcggtttgcccgacggtcagcagcgccagcagcgaaccgctgtactgggcgctgtcgcctagctggatgtagtaaggaggcagccaggcgatcaggctggcgtaaccggcattgatcagtccgaaatagagtcccagcgtccaggcgcggcgctggccaataatcgcgacccggggggaagcgctggtctgatgcggtgcgcgaggcaaatgccgacaaatcgccagccagctgagcagagccaggagcgcagggagcgcccaccaggctagcgcatcatgccaggccgcgctatgtgacgccagccatggggtgaacgcggcgcctaacccgccgccgcccatcagcgccgctgaccatagtcccatcaccagcggcgtccgtcggggaaagaggtgcttaattaccgccgggatggcggcctgaataatgccgatgccaattcctccggccagagcgctggtgagcagtaagccactattcggggcgatttcccgcagcagggcgcctaccgcgataatcagcaggctcagcgcaatactgcgcttttgaccgatatagcgatcgacccagccagcggccagcgccagcacccccatcgcgatcaccggcagcgcggtcaggagtgcggccagggtatagctcatgccgctggctgcgcggatgtccggcagcaaaggaccaatggaggtaagcagcggccgcatattgatcccagtcagtaccaggactgccagcgtcaggttctgtcgcagcgctggtgtcatgactgccgttccgcccagcgctgataaagttcagttccctccggctgcgggcgatgatggatcggcagcgtttgctggtccagcggctgctgcagctgctgataaatcgcggcggtcgagagctgaaaaggctccccgtcctgattgctattggcgaaaaacacttcccgcacgccggttaaatagagcgcgctcaggcacatagggcaaggttgtccgctggcatagatgacgcattcgcgcaacgccgcgcttccctgtctggcggcaagatcgcgaacggcgttcagttcggcatgcgccgttgggtcaccgctcagatgaaaggtattgacgctttcagcgacaatctcatcattccgcaccagcacggcgccgaaggggcgcccaccgtcagcaatgttttgttttgccagcactaatgcgcgctgaagataacgatcgtgagcggacatagtcactcctgcataaaacgatgttaaaggtgaaatatgttgagggtcgtgcgaagagggtacgtctcttgtttcataagttaaaagacttatttatgataatgcctattggaatttcttataggtgggccgatgcttctgcgccaactttcctactttatcgctgtggctgaacattgtggcttttcccgcgccgccgcggcgctgcatgtctcccagcctgcgctgtcacagcagatacgccagctggaagcgatgctggaggttcagcttttcgaccgctctggccgacgtattcgcctgaccgatgccggtgagatctggctggagtatgcgcgtcgcgcgttacgcgagcttgaggaaggtcggcgcgccttgcatgacgcagaagatctccagcacggtaaactccgcattgctatgacgccaactttcactacctatatgctgggcccgctgatggaggcgtactaccgacgctatcctggagtaaaagtgcttatccaggagatgaaccaggagcggatggaggcgatgctgctggaggatgaactggatgtggggattgcctttgacgacagccggtcacaggaaattgtggttcagccgctgctgacggaaacgcttgcgctggtggtgagccgtgcgcatccgctggcaggagagcgcgacttgcaactgcaggctctcgacgcccagccgctaattttactgagcagcgagtttgctacccgcgagcagattgatcgttattgccgccttcatcggctcgaaccagacgtgcggatggaggccaactccatcggggccgttctgtcggttattcgaagcacaacgttagcaacgctgctaccggcggcgatcgccggacagtttgatgatgtggtggcgattgagctaagacctgcgctgctgcagcgcacggcctgtttattgcagcggcagggcgcctggcagagcgccgcagcgcgcgaattcatcaccctggcccgagagaacgcgataacgattgagcaggaaaaccgccagtcccttgcctgaaggactacgttactcgccggcgaactgcgactcacggctggcttcgctgccgatatcgccttcatcgggctgggcattctctataagcatgccttcttccttaagcctttccagcacgtgatgaaagagctgagtcttgtctggctcagccatattctgcaacttctcattaaatacagtatgggactgaacaagataatggataaattccagcaatacctcactttgcggcaggacggttaattcctgctggatgtaacgggtttgatccagtagcggatttttcgtcacgtccataggccgggcgctaatactgtgggcgtatattttctcaatggcctggctggtgatatagatgcggttcaatgatatcgaggggcgttcgtcttcctctggaatgaaatgacaataaacaaatggtttatccggcagcatcatgctgaggcggttttcgaaaagaatatcatctggcgcctccagcagcgccattaggttccgacagtgtggatgccagagccctgaagcaaatacctttacgttgaactgggttaccgtatttccgcgcagggtttccatcgtcggaatatcgccttcaagtcgcagaatgctgcggatatgggagtgatgcgaccagactgtttctcctgcctcgactgaggtaaatggattaaacgcgctggttacctctttttcctgatgggagaggacggcgatttttaatattcccggcgttgggttaagcttaagacatagattgattgcgcctatatcatgccagtgaagaatgtcttccagttcgcagtttaataatttttgcgcccgcgccagagagcaatactccattggtggtaaattatttagcttccagatattccgttctgtaatattcataagaattgtatgtcgatgaaaaaataaatcgccatggtgagcaaaagtatcaatgacaatgatttattttttctgctgacttcctttacctgattaacaaaatccattcacattgagaataatatatcgataaattggctgtttttattgttttgctgccgcatatttactctttcccgttatcttatcatctcttattcgtagagaaaaatagtttgctgaatataagcgtttcttcctgtttagcagcaatatttaaggtgagtatgagcggagcacgaaaaaagggacggtcaatttggcaaactttgtggtcggcaggaagtatcaaacagacgcctgcggcgcctgtcgaagctacctgtagttattgcggcatagacaggaagcggtcacccggttgcgcgatggcataccaggccatcatttcggcagtgcctggctggccttcagcaggcgcccaggccatagtgtccatttcggcaagcggttgataagcaccttgcttaacttcaaataccatgccgccagcgtcgagtgagagcaccgtatgccaggtaccggcttccatttccagcgccgtgcaggtttcacccagcaccacccggcgggtaaccacgccgtggtcatcaaaattcagtaccacaaatcggcctttcagcggcagtaaaagttcgaaggtatgtctgtgccggtgggggcggatataggtgccgggttccatggcgatggccagacgctgtatcgggtcgcttagttcgggatgaaaattgcgatgggcacgcaggcgcggagcactggctgccgcttcgctctgctgctgcatatcgctgagggtgatctgtttcatatcaacgcctggctcctttgttgtccggagaagattacaccggggtagtggcttgtgactgaaaaagtcagaaggtattgtacgcagaaatgcgcgttgctgtcggtttattgtgtgcgtgattgacaaagacacgttcctttctggcaggactaaccatactgaaatcgttggctaattatgattacgagaagaatacgttctggctggcgtttaggtcatcgtggtgaatggcgggcaacgtttatatggtgtcccctgcatacatctaacctgatgtgcaggggattgaaatggatgatattttttacgtgtgaaaaatattttactcgttactttacccatcggagcgggacaagagcttttctctgaacttacaatggtcactatataaccaccttgctctgccgtggatgagtttggctttggggagatcgccggacttaatccggtcgtaaatgaaggtttttccaaagccagtatccgccatgatgaatttcagatcaacaaggctatctggttgcatctcatgtttcatcttccacctctcgttacagccaaatgcttatcacgtgcttcaacctcttcctggtagtcagcacaacgctggcatcccgccaccagttcccggcgccgctcgggtatctcttccccgcagtcgcggcagtgagtagccgaaactgccgcatgattgatgcgcatattctggatggtcatttccagccggcgctctgccagctcgttggcctgatcgatgatttctgcgctcatgctcattcctcacttttaagttcatcaggcaactcaacttcattacccaactgcgcgaatacgactgctcgacatacagcagcgcggggattgtctgcaaggagtccacgtcgcttacctggagacgctaactcgctcacgccaacccagtggtagacttttcctgtggcgggatctgccgactggtaacaactgatcgaaaagctctccattaactctccgcactggctccagtcggtagatggtgaaaacacatagcggctatggcgtttgcttttctcgccacatagctgatgcattccatttaaatagacctgagcatcttgcggcctggtaacttctccacctaacgcgatagctactgcaacatcaaggtgtagtcctgtaagactttctgtcttcactttcatgctgcaccgccttcaatgcgcttgaactcgataacccaaacccagggatcagcattccagttttcctgcccgtagatcgattgccacaggtaggcaaaagcatcggtagcgtcaggctctgggttggcgcatccacatggctcaggttctccgcaattaagacagccaccgtcaataatgccttctgctcgcgcatcctcttcgctaatagcgttcagccgctcaacgcgcacgtcggtgatttccagcagaatgcggctggcccagcgcggcatgtggatggatgggcgaagctttccggcgtcagaaacttttggaggggtttcgaatcctttccatccatcactgaaagtgcctgtaaactcgtagaaggtcggcgcccatggttttctgtatcctgttgccacagccatttcaccaacaccagttgggctaacatcgtctaacgatgccgggaaacgataagcctcacgcacccagatgcggtcgccgacgtccccgaacgggcaagcatctccaacaagcccaccccagccgcctttgccgttctgcatttcttcttcgacatgaagcattgttttgaacacgttgcttggccaccagtgtccaccccgggggcatggttctggttgaggtttcataatccgccgtgtctgcgtcttccggccgtcgaggatggcccgcaccatctccccgttaaaaatcattccgcgttctttcatgactcaaccgccttactcagcttctcgccgagagcaaagatgtagtcgcgtaactcttccagtgactgcgcttctgattgcagaatttcacgatggcaaagttctttcaccaggtgctcaaacttgctgtagtagccgagtcgagccagcgtttcctgaccggcgttcttaccatccttaatgatgcgtttctcgttcaggatgaggtcatgcgttgaccctgtgacgacgtatttatcaccgagttcgatgtgtaggtttttgctcatgattccactccataccgcccattcatgcggccaataacactgacaaatttcaccaggctgacacccatcggctttaccttctcgtagtgcttgcgaaggatgggggggcatacagcgttccacttcggtttaggctttacgctcatcgctttggttatctcttctgcgcagcgacgagcctgggcgcggagagcgttttctttttcttctggcgtcatgcagcctccagattcccgatccgctttaactcagccagcgatatggacgtgatgatgtgtcgcggggtgatgtacgggcgccaaataaacaggagcgagccttttgggttgctctggcgctttcctgtaacggatgcaggaacaaactgaacacggccacccgttatcagcctgagttcatcagctgattgcatggctgaaataaaccagccggtagaaatgtcagccggtagcaacatcactacggcctgagactgcgcccgggattgctcagcagccttttccacccacggcccaatatcggaatagggtgggttgcaccagatcgagccgcatgacgtccattcgctgttcagcgagtcatccagctcagtgagatagtgagcgcatagcgcattactctcagaggctgcagcatccagccagaagccaaactcgcggtcgagcgcgttgaaaatttcaatcggcgtttgccagtagtcacgttcattttttggagttttcgatccgccgaaatcagtcattgcgcacctcgtttcgtgtctgcctttctcatgcggcatggtcgtggttttttatgctggaaatctctttctccagctcttccaggaactttttcacttcggactgaatctcatttgccagtgcttcgtcgaagtgaatgcgctttttgaaataggcgaggtctggcggtagacgatcgtcgaaactaacgaaatcacaccatttgcgccctgtgcacatcatctgagcgtgcatctgcaacaggtactggcgttttggctcgccagtttttaaggtctcaagatgagtccaggtgttggggcacttaatttcgataagcccatcaccattaacaagcccatcaggacttgctgcgaatcctggtatagttgggtgatcgataagccccacctcagtgatttcggcatcgaactcattcagcgcatacatctcgcgtgctaccggctcgagttctgttccgcgtatcattgcggcgttggagaaaccttcttcaagcttcccggtgaggcgctggcaaatcagctcggccatgtagttctgtcggcttgctgcatagccagacttggttctggccatgacgtcagcaaggcggctggctgtgacttttccgcagcgagcggcaaaccattctggggtgcgttgttccatcatttatcctccggcgctgcggcatcgacaggttctgcgttgtcgactgcaaggctcatgtcatacatgcgacgcttctcaaccgcgccgataacctgtttctcttctgcgcttaacgccacccagaattcctggtacttaacagttccaaggcgtgcggcagactcgccttttgcgatcagttccgggcgacgaccatccgactcatgccctacatgaacctctgtcgtactcccttcaatgacacgctcggcttcgtcctgatcgaagatgccagcaaacccaaatgcgagacgcgcacactggatcagcgtcttgtgacgaagcatacgggtagggtgggactgccatggctgagtgttgcgtttgcactctcccatgtactcagtaacgatggtcgggtgtgtccggtctttccggtatatcttgcaggtacacgcgccttcttccttgtcgtaggcaaactccattccatcaaactgaggatgttcgttgatgattcgagcccagccgtcaacgccgactacaggaacaattccacctttatccgggaatgcataaatctcttttgtccacgggttcagtccgtactggttggcgacgatcagcagtgccgtgaactgctcatcagtgacattcccacccttaaatgctgtatttttcagcgtgttcatcaggtcagttccggcatccatgccgaggcgggaggcaagcttccctgccattgtagaaagtgctgtgctcatagaattccccttaaatttaaaacgggcagccggtgcggtgatcccagtcgtattccgcctgggcgtaagcaactgccgaaatgaaatcgttatatgcctctccggcggaatcgctgcggaggccttcgtatgggcttttgtccatcggcacagagaagcggaacaggcctgagggctctttcggcagggcgtcgataatttcctgcgcccgatcttcaatccacttttccttctcttctgacagcgtttgttcagcccacttacgctcttcgatcacgtcatatgcgcggtatgcgttcataagcacctcagtaactgataccggtatgaggaatgcggccgtctttaaccgcggcaagcacctcgatagcctgatcccgggtaaggctggtattggccatcagagccttaacaacctcggcacccacagccttgcggtgcttaacgtcggcttcgcggcgcgcctgctcatcggctttacgtttctcctcagccaggcgggcctgttcgcgcagctctgcctctcggcggatgcggtcagcttcttcctgtgctttgcggcgttccgcttcgatagcggcctgcttttcagcctcagctttctgctcggctgcaatgcgatctcgctctgcctgctcagcttgtgctttcaacacagcttcacgatgcgccgcttcttcacgttcacgctgtgcgcgctgctcaacttcgcgggctgctgcagctgctgccagtcgcttaatttcttcttcatgggcaatgcgctggcgctcagcctcagccgctttatctgcctgctcacgatcgaaagcgtcattcatcagcagagccatttcgtggtcagactcaatccgagctgccagctgccgatcgaagtcttcattcatggccagtgcttcgacgtgaagggcggtcatggcttcttcggccttaatgcgctcctgctcggcttcccattcggtcaacgggcgacgcacttcatctttcagcgcatcgagacgctcacggacaacgcggcggctttcatcgatttgctttggcagcgcctttaactcagcgaccagatctttacctgcgttgtcgatgtaggttttagagcgcgcgaccttgtgggccatggatgcgatggcgtcgcggccttttttggtggttacgtccggaaccaggctgcgagcctctttttcgatcgcttcaataagcgggtcgagctggtcgttattggtgaaaaccgccatcgcgttctttttctcaatgacgactaaatccattatttcgctcatggtttcccctccaaaaggttgttattaataacttcgttatttgcaaatttgccatggagtttcagccgataatcctttattgccgactcagcatctttaagtgacaaataactccctatttctttgtttttcccttttatggatatgctggcccggaatcttttccttctgccatcccagctaacaccctttactcctgttttgttatttttcccggctgcgctattccacatattttgctcagcggtggcctctcttaggttattgattttattgttttctctgttgccatcaatgtggtctatcatgttgactgggaatgttccatgcgtaactagccacgcgaggcgatgagcaaaataaaacttcccgtcaatttttatgagaatgtaaccttgtccatttttgcttcctgcgatacatccagacttagcctttccccggcggttaaccttccaagtaaataaccctgaatcaggcgaataatctaataactcatcaagtctttctttattcagcatgcgtgcctcccggcgcgatgaaagccgcctgatagttcagttaaattcttcgtttcgattaccggctgagaccttgtcccaacccgttcagataaacttcaaccagcaagtcggttgtgtaagtccgctcaatcccgcgatgcaggtacaggcggccgcgtttatttgctgatgctgtccaggtgctttcccgatgcttaacgagcatccctgggagaacggcgccgcggttaacggtctgtgtcccgtaatgatgactaaccattgaacacccccgtaacgtgcagaattttgataatcaacgctgtccatataacgccgcagatcagcaggcagtaaatcagtgaacgaatgccttgtttgctcattttccaccccagcactgaatgctaactacgaggactgcaaccaaaaacggaacgacctttaaccaaaaattacgccatgcaggcttgtcttcttcgcggatcatctcttcacctttgccttaaagccggccagctgagcgtttgacttacgtccggcgttgccggtgttgtttggatggcttaaatttacagataaaactgtattttcgtcaacagacaaaactgtattttttgtcattgattacatatctaactgtaatgaaaggtgatttattttgatggggcgaaaaaaaaaccggcatacgccggttctattctgagagggggagggggttagcgctttcttcgatagattctgtgttcaatcatcacgccgatgattgttagtggttgatgatcgctactgataatcgggtagtcatcattcaatggcacaagctcgaaatgctggcagcccaggtgatccgtgtaagtaggccgatattttttaaaggtcgcttgagccccaccgttcttggccacaacaaactctccgggggttggctcaacttcggggtctacaatgatcacatctccggccttgaagtctggctccatcgaatcgccttcgatgcgtaaagcaaaagtaaaatcagaaacttcgttgtctgtaaggatgtactcaaaactcccatcaaatgcctcaatgggatttttttctgcgagagcccctgcctggacatagcttatgagaggcaccttcttgctgctaacttcagcaataggcataaaggctccgccattcattagccagtcaggatcgcactttagcgccttagctatgccaataatgttacgcggttttctggtgtctcccttttcaatgctctgccatgactgctgagttattccggcattcaacgctgcctcggtctgcgttagaccgagctcaattctcttttgctttacgcgatctgcaaggctcataaatccctctcaatgtatgccttgatattcacagttaaaactgtaattgacaaacagaaataactgtcacaaaatacagataaaactgtaggaggtaacatggaaaccatttcgcaacgcctcaaaaaaaagcgcgaagagatgaatctgtctcaggcgcaattagcaaaaaaagttggcatgagacagcagtctctgcaggcaattgaggccgggacaaccaagcgcccacgttatttgttcgaactggcaactgcgctccattgcgaccctaagtggctgctttatggcgagatgccatctcaatctcaataagttgccgatttaatcggcctttcaaacaccaccagaggaagtatcacagatggagagttcaacgacacgcaacaaagtggaggctcagaggatagaaagctggttacacagccagatagctgaactggggaccacaactatagccaaagtggccggagtgaataagtcgacggtgagtcgctggcgggaaagtctgcttccgaacatgtcgctgctgctggccatcctgatttctaacaggccgggagagaaaggtgactttgaagcatgagtgggaacagaaaggcgaaagccgcagtgggcaaacactaacggctttctacgcgaattaactggatcaattcacaggagtaattatgcctaagagcaacagattttaccaggcacaaacacacaaaaatgttacccgcgatcgcttcattcgctcggttaacccggtggttggcatgaaaatgcgcgccatcctggaagagctgaaacggaaggaggaaggccgtgagtaacgttctccgcatatccgattttagagggtctcagaagcccatggaaaaacctcagccatcagggcaggggttggtattcctgcaccgtaaagtaagagagctgccgttctacaagaccgacagtgaagccgtccatctgtggatccatctcatcatggaggtgaattcagctgacgggatggtaaccacagagtttggtgagtatccagtttcccgcggtcaggtgatcaccgggcgacataccctgtcgaaagacacaggaatagcacctgaccgggtgaaatatcttctgaacaaattcgccaaaatgggcatggtcaccaccctggcaaacaagaaattcaccctcttaaccgtcaccaaatatgacgattatcagcagttttttgtgccaacagaatgccaacagagtgccaacgcaaacccagtaaccacgctgcgtacaagtgaggttgtgccaacagaatgccaacagagtgccacaaacaatatattaaataatatctcttctactgacgtagaagagagtgcatcagcatcgaaaaaatcagaaccgaaaaaaccgtctctcagctgtgagcaggttgttgaggtttaccaccaggttctgccagaagcacaaggcatcaggatccttactgacaagcgacgtaacctgatccgctcgttctggcagaaggccaacaaaatcacccgtcagcttgatggccacagctttaccctggccgactgggagtcttacctgagctacatcgccagtaactgccgctggatgcttgagaatcgccctgatcagcgcaccgggaaaacttggcgccgcaagtcgctggaatacttcctgaacgtcgacgtctacgccaaaacgcgcgagggagcctgtgatgacctctgatttcatgactcctccgcacagcattgaagcagagcagagcgtacttggcggacttctgctggatgacgacagcagcgaacgcactcagaaggttctgtctatcctcaagccggaatcgttctactcgcgtcagcaccaggtcattttcgcagaaatgcgccagatgtaccgcgaccataagcctgtcgatctgctgaccctgtttgatgctctcgatagcaaagggctgacggaaaccgttggtggctttgcatacctggctgaaatgtcgaagaacacgccaagcgcggcgaacatcgtggcctatgcaatgcgtgttcgtgagaccgctatggagcgctacggcatcgagaaaacaacgaaggcgatcgagttgctttatgcccgtaacggcatgacggcagaacagaagtttgacgcaattcagggattattcactgagataaccgagcacgtaaaaaccgggatacggacagggcttcgcacgttctatgacgctgttactgactggtcggcggaattcgacgaaaggctcaagccggatggtcgttcccgtgggttatctaccgggatccgctctctggatgagttgctcggtgtgaagcgcattgttcgcggcagcctgtttgttataggcgctcgcccgaagatgggtaaaaccacgctctatacccagatggggatcaactgcgccacggtagaaaatgagccggccctgatgttctcactggaaatgccggaagggcagatggtggagaaaatcactgcgcagaaggggcggatctctccaaacctgttttacccggatatgacgaaggaagactacggatatcgcggcgactggaacggcgatctgaagaaagctaccggcgttatgggcgcccttattgaaaccaacaatctcctgattgatgacacaccgggtatttcactggcgcatgtcgtggctgagtcacgtcgcatcaagcgtgaacgcggcaaggtcggaatgatcctcgttgactacctgacgctgatgactgccgataaggcagagcgaaatgacctggcttacgggctgatcaccaaaggcctcaagacgctggcgaaggagctggattgcgtcgtggttctcctgactcagcttaaccgtgagcttgagaagcgaaccaataagcgccccttgccgagtgactcccgcgacaccgggcagattgaacaggactgcgattactggctggccatataccgggagggcgcctacgacgagaacgcaaaccagagtgacacagagctcctcctgcgccttaaccggcatggtgagactggtgttgtctattgcgagcaacgtcacggggcgatttatgactgcgatcaggaggctgccagtcagcgccggcgcgagaaagaggaaaaaccaaccaagcggggtggattttgatgaaaaagaactcgggcaaacaagccgttattaacttcatcggccagcatccaggctgcagctttcaggatatccgccgcggtaccggccttgactcttcagtggtcaattcctccctgtggcagatgaaccgtgacggcgaggttaagcgagaaggggagtgcaggagctaccggtacacactgatcgacacgacagccgtaaccgaaagcgatccgtctgttcagtatcgccagcgtcctgacggagtaaacccaatgactaacctgtttaaccagtgcctggcgggagtaagaaaatgaaaaacgaaatcgaacagattgcacagcaaaacgatatgagcattgaattcgtaacctggttctttaacgagaagaaggtggggtgcggaaatgtctggttcatgatgatggctgcaatgtgggagggctggaaaggtcgtagcatcgaaatggataagctggctgcggagaatgtggcgctcaaatcggctgttgatcatacgattgaatggatagaaagcacgaacggcgacccttgcgatgtagtcattcttaaaggcatcagaacccccgccaccgatcgcatcgtagccgggattaaggctgatggggtggagatggtacttgatcttattggtcatacaaagggaatgctttacgcagatagcgtaaaggagatgctttctgacgtttcctccaagctgcgcgagggggccgacaaatgagcgtcgccacttatctcaataccggtttagccattcttggatgggcatacatcatggttaaaacaggccagtggattaccaaaaatgctctgaggcagtgggacaagcgtcgtaaggaatctcgccgccagaaagctgtgaatgagttttatgacgcctttgagcttaacagtctggaacctggctctaccattcgcctggccactaaaggcgacctgacaatcatgatgttccgcagcgagggggccaaatgattcacttccacggagggccaatcacgccagatacctgtgcgttgaaagcgtggaaggggcgccatgcgttcattagctttgcaaacgccgggcagttagcactggctagcgaggttactcagtcatttgctctggataacggcgcattcagtttctggacgaaaaaacgcgttgtggactggaacgagtattaccggttcgtcgagcgttgggctaatcacccgcggttctcattcgccattatcccggacgttatcggcggcagtagcgaggaaaacgatgcgctgatagcagagtggccacacggaaagtttattggggctccagtgtggcacatgaacgaaccagacgagcggtttattcagctctgcaatgagttcccccgcgtggcaatcggcagcatgggcgaatacgacgcaaagcggccgcgccgctgtgtggctcgcctgcgtgacttaatccggcatgttgtggatgagaacggctacccgatttgcaaactgcacggcctgcggatgcttaatgccgatattttccgccatataccgctgtcatcagctgatagcacaaacgtggcccgcaatatcggtatcgataaatcatggcagaaatcagcctatgcaccggccagcaaagaaacgagagccgctgtactcgttgagcgtatcgagtcaatgaacagcgccagtgcgctcaactataacgccgaacgcgaccgctttatgccgcaattggcctttgagatttagggagtcaaccatgactgatatcaccgaactggcgcagagcctgaaagcggcagcagagaaggctactccgggtgaatgggtttattttccgaaaaataccagcattgagtatgacgtaggcagtgatgaatctcagggctcaatcctctatgtcgatagtggtgatttcacccaagctcagacagacaggaatggagagttcatcgccctggctaaccctgcaaacatcctcgcgctggtagaggcgctggagaaggcgcaggccaaagcagatgtatatgacatgcttagggatgactacggtttgcgcgaaaaaggcgttggacttgcagacttcgttgactggcaggctaagtgcatcgcagagctggagtcccgcaccgtcaccgtgaagctgccgaagccacacgctcacttaatctggattcaggcaggtcatgcgccagatgattactgggatgatgtagctgtatctcatagcgagaaagaccgctgctgcgatgggtcagagcgctatccggtttatgcgcgctgggaaattgaagagatgctcgctgccgctggcatcaaggtggaggctgattgatgttcataatcgaaagccccgagcagcgcctgaagcgcgttctcaaagaaaacgccgttaaattcaccatcgacgaagacggcggcatccataccaactggcagcatcccgaagtacaggcaactatgcgcaggcactttgaggcgctcagcaaaattaaggtggaccggaaatgagcgaattttcacgagaaacactactcaacattatcgagactgaccatgtgcaatgcggtgaggcttcggcattggccagcatggcgctggccgcaatggacagcgagtcagggtgtttgcctctcgactacctgcaggggcacaaagacggtctggaatgggccgcccaactggcagaagccaatcaccctgaaacaggagactggctttacgatgaccctatcgagctggcaaaagctattcgcaaaggtccagataggtcgccagtgcagccggtagcggacagcgagctggatcgcaatcctgtgctggcgtatgccgacagttatcgtgatatggcgaaacaaggcgtcgagtcagtcccaatttggagcgtcattaccgacctcgagcgaaacatagcgccgctctatcgccacgcgcagcagccggtagtgccggaggaaaaaccaattccaaatacactgagcatgtacgccgtggatgcagtagcagccatcgctgaggtgaagggctggaacgcctgccgcgccgccatgcttgcagccgccccgcagtcacccggcagtgaacccgctaccgtgccgggtgaatggattccggtaagtgagcggatgccagaccgtgaagttgacgttcaggtttactgcccagataagaaggagcagatggttgcctaccttgagcgtaatgagctggatggctatttcaggttcgcaacgtggagaactggcgacggtatttattgccagcccacccactggatgcagctgccggctgggccgcaggaggcgaaaggtgagtgacgtaaaaagcaaaatcatgcaggtgttgatcgagggagtggatcaacaggagaaatgggcacacggccattatccctatcgcgtggctacctggaatattcgatgcgcgatggagcgcaaattccccggggtggagtggaaaaacgcagacctgcgaaaagcgctcatcgagctggcgaaggatgggctggtatccaaatgtccccacgagagtcgcattggtcaggctgtctggcgtctggaggtgaaaagtgaataaggccgaattgcttgagaagatatcggcgctcgctactgaatgccacacgctggcctgtgagcttgatattggtgatgagcgaaccgaaatgttcgaaatctacggcgtgctgcacaacctaggccgccgcgggtacgccagtcaggtagggcggcgcatgaatccgctgcttgattcctgcgatgacgacgaggatgaggaagatgacgacgactgatgcctaaacccaccgcagtaagcaaatccgcgacattataaagtattctggtagggtatactctgccaaggagggtaccctatgaaaaaatcagatgttttttccactatcagaaagacggtcgattgcgccccaaaaggagacagaacagttactgttcagcttcagattatcaaatattaccatcaccttactgacgtaactcctaaagaatttgttgaagaaattggacttaaaagttcattggttacactctttactgattctatgaagcttgccaggaaactgtctgaggtgggatttgataaggaaaaaatttaatgtcacagtggaacattgcagccaaaccgaaagacgagcaggacaaggtcaacgttgacctcgcagcgtccggcgtcgcttacaaagagcgcctgaacatgccagttgtcgccgaagtggtggccagagagcagccagagcatctgcgcgagtatttcatggagcgcgttcgctactaccgcgagcagagcatccagctaccccgagcatccgatccgcgctatctggaaatggctgagcagaacgccaaaaaatagcgattttctcgtatatgctcattttgcttttatccccgtgacgggcgataattacctcgtcagcctgagcaactgacgacttacttccggcgccaagtggggacacatggcgcacaaaaccgtacagcaatccctgtcaccgatggcgaaagccaccggcgattttctgcattcagcgtttgacctctccggaggtgaagcgtgaagcaacaattctgccttatcaacgacaacgttaagcgtaacgccgtcagtttcatccagtctctgcccgtcgaccaccgatcgccgctgattatcgaggcgcgcgaagaaagccgcaccgacaaacagaatcgcctcatgtggccacttttgaaagacctaagcgatcaggttatctggtacggcgaaaagctggagccggcagagtggaaagacctcatcaccgtgctggtcagccagacacaaaacccggagcgtgagcagaaatccgccccgggcatcaacggcggccgcgtctacttcggcgttcgtacctccaaatccagcaagcgctatatggtcgaggttatcgaggcgatttactggttcggcaccgagcacaatgtgaagttcagcgagaagtccagtagtcggattgcatgggcccaggaatggagggcttcgcatgcacagtctgctcgctaaggtcatggagcgcggcatcttccgcgtaccggcacgccgcaaacgcaaggtcgaagttaagccttccgacatcccgaccctgaaagactacaccgcccgcctggtcgataagaagtggcttcgcctgagagcaaggaggccacatgcgtaaacctgcacgtcgtaaatgcgcccactgccgcgaatggttccatcctgcccgggaagggcaggtggtatgcagttttgaatgcgccagcgcgatcggcaaaaaacagacagcaaaagcccgggaagtggcgaaggccagggcggtgaagcgccagcgcgaatccgagaaagaggggcgtcagcgccgtaaagcaagattggctgaactcagacctaacggttactacaaagcccaggctcagaaggcattcaacgcctacatccgcgctcgtgatgctggtttgccatgcatcagttgcggcgagaccaacccgcctgatctgcatggcggccagtgggactgcggccacttcaaaacggtcggcgcttaccctgagttgcgttttgaagagcgcaacgctcataagcagtgcaaatcgtgcaatgccgggtcggggaagtacacagccaaagaggcgacggttgctcagcaatatgaagttggcctggttgctcgttatggacaggagtatgtcgactggcttaacggaccccacgaaatgaccaactaccgccgggaagactttattcgtatccgcgatgagtaccgcgccaagctcaaagcactgaaacagcgggaggctgcatgagccgtgacgttatcgaacgcatccgcgaccgttggcaaaagctccgcctcttgcgtagccgcggcaccgtactggttgactacaaaatattacgcaatttcgtccgtatctataagcgcctgggagagacagcatgaaactggaattaaccaacgaacagcaccagtggatagatcagtggctccagctttggggcgcatggtgccagacagggaagatagacaaggcgatgataaatatgattgccaagttcatggccacggttgaaccgcaagcaccatcaaggcctgtatgcagcgatgatgatgggttgctgattgatgccgtaatccggcattacctgaaaaacgtagatgagaacgcatggaaggtaatttttgcctattacgtctgtaactcaagcgagataaggatcgcctcatggcagcatgctgtgagcaagcctcgcctgatgaagacgcgcgccggaaaccagtataagcacccaagcatttcaaccatccgccgggaagttaagcaggttatcaacgcggcactcttttgcctgtaccagccgctgcaaaatgcgtttaacgatcgcgaaagcgtgaggaaaattgcaaaaaatagtcataacgtgcttgcatttcaatgaacaaatgagcaatatatttagtgtaggttgccgtatttgcgtttgacctatcagaacaccgagcctcgcaatagtgcggggcttttttatgcctgcgatccggtcagggctcttgggtagagacgtgctgcacgacacgtcaaagcccttccgcgcagagccctgaaccagattgcatctgtcgtagtttggtaattacgtctggcttccaaccagaatatgcgggttcgatccccgccagatgctccaatccctctaccttgggaccattacggctaccgcgccgtcactttttacccttggtatttcttcccgccttgagcgggttttttattgagcatgcccagaccctcgggaatcatccccgacgtgctttgttgataaatcagcccgcagggtctgggcctcttttcccctttacgcacagcgccatccgtcatcaacggaggtgaggttatgacaaaaatgagcaccatttacagcagactttcatacggcaccgggaccgcactgacgggctgcggtgtctcagcaaaggcgtatgccggggcagttaaggcagaggtatggattttggccgacaaaatagcggggatgaccctgagtgactgggcaattattgtcggtatcgcctgcaccattaccacctgtggggtgaactggtactacaggcggaaagaacgcgaggatcggctcaatggctatgacaccaaaactgaggaatagcgttatcgctgccatcggcggtggcgccatagccattgcttctgcgctcatcaccggcccaactggtaacgatggtcttgaaggtgtgcgttatgacccctatcaggatgtggtaggcgtatggactgtctgttatggccacactggcaaagatatcatgctcggcaagaagtacaccgaggctgaatgccgtgcgctgctcagcaaagacctgaacaccgtcgcccgccagattaacccttacatccagaagcagatccccgagacaatgcgcggggcgctttactcattcgcgtataacgtcggcgctggcaacttccaaacctccacgctactgcgcaaaatcaaccagggcgaccagaaaggtgcatgtgatcagctgcgccgctggacttacgccaagggcaagcagtggaaaggcctggtaactcgtcgcgagattgagcgtgaagtttgtttgtgggggcagaaatgagccggttaaccgccattatgagcgccattgtgatctgcctgatagtcagtctcggatggttggctagccactaccacgataacgcgaccgaattcaaaaggcagcgggacaaagcaaccgagcaactcagcctggcgaaagacaccatcgctgacatgcagacccgccagcgagacgtcgcggcgctcgatgccaaatacacgaaggaattagccgatgaaaaagctaaaaatgatgctctgcagcgtaagcttgataatggtggtcgggtgctcgtcaaaggcaagtgtccagtgccagccgcaacccaaaccaccggcacccccagcatgggcgatgatgccaccgtcgaactctctgcagttgctggacgaaacgttctcggtatccggtccggaatcctcagcgaccaaacagccctgagagccctgcaggaatacatcaccacgcagtgtttgaaataaggcattcattgaatgcctgtgataatgtttccccatgtactaatcaagcgggaaaaaaatgaatcaggtcattctcattcttgaagggcaaaagcctcagtcaatcaatgtcgctgatggtattaaatcagtcaggcatcttctttctgatggacgtgaggtgtacatagatatcatgactgctatcgtcaggacttcacacggtgggcaagagtcataccttgttgcaacggatattgatgatatttctccgcgagaaatacagcgcgcggcggagttattgtttccccgtacttaattttgactcttcgaagccatcacaaaggccacccacgggtggctttcccatgtttagttctgcagacacaccgatccccggaatggaggttccgttcacgtggcaggctagtctggagttaaacgcgaagctttactctgcgctggggcagtgcaatctggataagacggggattagaaatatagaggagagccggtcaaaaagtagtgggccacgctcagaatgaatgcggtgaagagataggtgattgggtgatttattattttgctcggcaaactgattttcaacatttattctcctttttgattattgggctaagtctgatttctattgtgtaacttaatttcaccctgtggctgttcctactccggtaacattaaactcttacgcggtgatgtatctatactcgccactattaaatccgccgcacgttggacaaggtctctatagtgggccctaattccttctgaacagcctttgtctcttataggagataaatccattcacgccgctaggtgtaatgaaaacagtaatggcgctgccctgagagcagtgccgagcagataaaataaggaatggagtatgagcaaacccgactgggaggccatcgagacggcataccgggccggggtgatgtctctccgtgaaatcgcatcgcagcacggcatcagcgaaggcgctatccgtaagcgtgccaagcgtgacgactggtcgcgcgacctgaatgcgaagattcagcaaaaggctgacgacttggtacgcaagcgggaggtacgcaggacggtacgcaacgaaagcactttgaccgaacgcgtactgatagaggcgacagccgaggttattgcaacggtacgcatggagcaccggggagacatccggcgggctcgcgaactgaccaatacgctattcgatgaattggccggagagtgtggcaacgtggccgcgcttgaagacctgggcgagatgatgcgatcgcctgatgacaaaggcatggataagctcaacgatctctaccacaaaataatcagtcttccttcccgcgttaaatccatgaaagacctgagcgacagcctgaaaacgcttatcggcctcgaacgagaggcatacagcattgagaataaggctgaaacgaaagaggtcacgcataacgtcatgctggtaccaaccagcgataacgtggatgactgggaagcggcggcgcagaaacaacagggtgaggtgctcggtggatgaattacaaagctgtatggaagccactgcctggatcacagtctctggctctgagttgcccttgtaacgaaatacttttcgaaggtactcgcggacccggtaaaactgctgcgcagttggcccggttccggcgcaatgttggcgtgggctatggctcgttctggcgtggcgtcatcttcgataccgaatataagaaccttgccgacatcatcacgcagtcgaagcgtatgtttcgtctgttcaacgatggtgctcgatatctgtcatctgcgagcgaattgcgatgggtatggcccacaggcgaggagcttctcttccgcttcggcaaagaggcagacgactactgggattatcacgggcaggaattcccgttcattggctttaacgaactgacgaaacagcagtcccctgaattctacgaaatgatgttctcctgccgacgctcatcgttcaggccggaaaactacccgctggagaatggcaaattactgaggccaatcccgctggagacgttcagcacgaccaacccgtttggcatcgggcatacctgggtgaagaaacgcttcattgagccagcgccgcgcggaaccgtgcagcgagaccggcaaatggtgttcaaccctcagacagaacgagaagaggaaatcacgcttacccgcgtagctatccacggatcgtttaaagagaacccgtacctcgacccgcagtacatcgcgaccctgatggccatcaaagacccaaaccggcgcaaagcgtgggtagagggttcctgggatgtgactagtggcgggagatttgaccacctgtggaatgaagcgctgcacgtcattaagccattccgcatcccggatagttggaccgtcgatcgctctcatgactggggtgagtcaaagccgttctctaacctctggtgggctcagaccgatggaacagccgccgaactacctgatggtcgacagttctgcccgcctgccggttcccttatcctgataggtgaatggtacggatgcccgcctgacgagctcaacaagggcctgaatatttcatccactaacgttgcgaaaggcgtggcgtggattgacaagcggctggttggtgaagacgtcaacgaacctgaagagattcaaatcgacggtgtcacgcagggccaactgaacattgttcctggaatatgttcggaagttatcccgggcccggctgatagcgccattttcaacactggggacgatgagttatcgatcggccagaaaatggagaatcagggcgtcgaatggctggaggccaataagaagcctggctcgcgagtcaacggagcctcggtattcgctgacatgcttgaggctgtcgttgagggcaaaaagctggagtctggcatcccggagaagcctgccttttatgtgttcgagcattgccgaggctggattagccgcattccagtgctagttcgcgacagcaaaaacccagatgacgtagatacccagcaggaagaccacgattgggatgcaacccgttaccgcgtgctgcactctcctcgccgttcaggggcgatattcttcacataaggacaactcagtgagtaacgatacagaaatgcaagtcctcgctgggctgattgtgaatagcctcaacgaggtctcgcgatctcgacagctttatgcgactggtttcaatagatcaggtaataccaagcggcaccatctgtggtgtgaatttggctatcctgagcgtctcgactttgatcacttttacaacatgtatgagcgcaatggcgccgcattcggtgccgtccataaattgctcgatgcatgctggtctgataatcctgtaatagttgatggtgatgagacgaagaagtccaagaagtcgacgccttgggaaaagaaagtcaccaagctcatgaagaagtactgggctaaggtgaaggacgcggatagacgaaaccttgtcgggcactactcagccctcatcctccagtttgcagatagccgggaatggtctgaaccagtaaatcgcgaggttatgcgtaattcgcgtgagcgcggcttagtaaagatgattcctgcatgggaatcacaagtgaagccgggggaattagagcaggatcagaagtctcctaactacgccatgccgaagttttattatttccaggagcaacctgttggggataacggaaatattgtcgggccgatgcgttctatcaatatccacccagaacgaatcatcattttttgcgaaggttcggaagatgaatcttctttggctggcattcctttcttgcgtgcaggctataacgaccttcttgacatggcgaaaacctccggcggtagcgctgaggggttcctgaaaaatgccagcaggcagctcggcatcaacatgtcgaaagataccaagattgaaaaaatcatggaggatgccaagaaggctggatattcaggtctggcggaggcgctaaacgccgctatccagaagcttaactcgggaaccgattcggctttggttacccaggatggtgaggctaaagtcctttctgtcgccgctgccgatcccagccctacatggacagtgtcagcgaaccagttttcctcttcagttcagattcctttcaccatcctttttggtcagcaaacagggaggcttgcttctgatgaggacaaaaaagattttgccaaacgctgtaacgggaggagaaatggattccagacagaccgtgttaccgcggtcatcgagagactgtggactgtagaggttatcgatccgcctaagtcaggagaaataacgttaacctggtctgatctgctcgcgccaagtgagaaagagaagattgccaacatgaaggaaatggctgcagtcgcgaaggatacccagcaagcctacggcacacctgctgtcgatgagaatgaggtcagggaggcgggggagctcgaaccgcgcgaagaagtgaaaactccggacccaaaccaaaaggtaactaccgatgatcctctttccgatgaatccggagcaaaaggcgaaagtcgggacgccagtagtgccacgcagtaaggttgacccgacgcgatcggcgaagcaggtcagcgcaatgttccgggatatcgaggaccggtatctcggcatcaagcgcgctctgaaatcgctcttcgaccagcgcctgaccgggagagagcgagaggttaacagccacaactggcacttcctgtgccacgaccacggcgaagatgtgaggctctaccaggtcaatgccggcaagttcatctatgacatgtcagcgcaggagttggctgatctgctcgaagcggtacaggtaattctcgacgatttcctgctggaaggcggcgaacaaaacctctgggcgatggattacgtcgccgcagaggcgcagcgcggaacgctggaggccttcaacaacctgtcgcagcagtcgcaggtgtacgccagccagacaacgctacagcagcttttaagcagccccggttatctgaaccagatagcggcggccaggctgactacttttagcgactggaaggtcatcagcgacaccgcccgcggcgatctgaccaacatcattaccgatgcggtcgcgcgcggggtgaatcctcgcgagacggccagcgtcatcagcaagcgcctcgatgtatcgatgtcgaaggccaagaccattgctcagactgagcaggtcggcgcgctgcggcaggcgcaatggaacgagacggactgggctgctgaccggttaggtttgaataccggcttgctgtggctgtcggcactcaagccgaccacgcgcagctggcacgccagccgtcacggcaaggtctacaccaccgagcaggtgcgagacttctacgctgagaacggcaaccggtacaactgctattgcagccagattccagtgctgctcaacgacgacggcagcatttttaacgaaggtctcgcggagaaattgaagaaagagcgagagcagtggaaattggcagaggctgcatgatacaaggaggttttgcggaggtttttatggcaaaacctgatgagccgtatcgtaagttgattgttgagagctactacccagccagtacctctggtagaaaagggaaggttcatatcaggccaacacctggacaatgggcaagcccatcactggctgtcgaatgttccaaaaagttgtcagacttgaagttgtacccaataggtagtcagttcgaaattactgccaaactgaccgacagggaagagggcggtgaatacatttacagttcattccgatgggagtttaaacacattaaataggtcgccacggcggccttttttattgcctgaaatccaccaatgaggacccagcatgaaacgcaatcgcgttaacgtgctgaccgtcgtcaactccgcttcaaacatcaccactgaaaccatcgacggcaagccacatatcgtggttcgcggcatcacgcctgttgtggacgatatcgtgatgaaccggaagttgtacccggcagcagaaatcgaaaaggcctacaacacgcttgagcgtaacccgatgccgcttggccacccgaaggttgacggcaagcatgtgtctgctcgcgatgtccgggcggtgaatgaatatcacgtaggcgcatggctgcagaacgtcagccacgaaggtgggaaggtgacgggtgatatgtacgttaaccgccagtacgccgagtcaagcgagaagggcaagcgcctgattaatcgccttgatgagatgatctccggtaccaactcagaacccatccatatctctaccggactcctatattccggcattgccgctaatggtgagtcgaagggcaagaagtacaacgagatcgccaccaacatgatgtttgaccatgtggcggtgctgctcgatgagcctggcgccggaactccggaagaaggcgtgggcatcttcgtcaactcagaaggtcatgagcagcagatcgaagttgctcgccttgctgatggtatcgactgcacccgcgaaggtctgctcaacaagaccaaattcttcttcaccaacgcctccaacttctcttttgacgacatttcacgcgctatcagcgacaagttgcgtgagggtgacacagaagataagtggctatggccagaaacggtgtggccagacagcttcatctaccgcgatgaagccaagtatttcaaacagaagtacctcatcgatgacgacggcaaagccgtgtttgtcggcgaacctgtagaagtcgtgcgcaaacccattgagtacgagattaaaaccaacggagagaacgatccgatgaaagaactgattatcaatgcgctgcaagccgcgggtaagccgactgaaggcaagtccgatgccgaactgatggacgcttacaaccagctagcggcagagaaggcggcagccaagaaagatggcggcgacgaaatcgatcccgccaccggcaagcctaagaaaaaagagcaggccagcaacagcgaagaagcgccggcatggtttaagccatttgctgatgatttggcagccgttaagtcaggccttgccgtgaacgctgacaaagagaaaggcgaaaaacgcgctgccgtaaaagcgaaattcgggctggatgacctggcggtgaatgcgcttgacggcgccgcccttgatggcctgtttgctcagtgccagacctctaccggcctgaatggtgcattccgtccggtcaacaacaacgattctttcagcgaaatgccggagtaaaaaatggctaaagacgggaaacacgtaattcacgcgggcgggattttccccaacccgcaacttaatcgtgaaggttctgcggccgcagcgtttctgccgggtaccgttatctttttcagtgcagccaagcctacaccgtctgttgatggcgctgaagacgcaattctttacgttgctaactacgactatttgcgctgcaaaacggttgacgatgcctatgcgatcggtgactgggtggtaaacatccagccaacgccgggcgttttcctcaacgttcgcgctgccgctggtacctacaccaagggccagccggtttctgtggccaatggccaaattaaagcactggcagagggtgaaaccatctttgcctatgtcgaagaagacaagtccctgaccgccacagcaggcgatctggttcgcgtcgtgttcaagtaaggagagactgaatgtttgtattttccacccgacgcgcgactgagacgggcaacctcgaagcgaaccaggcgcagttcaatgagctgcaactggcgcgcaatatgagtgctcaggccgttgctgatttcgtatcccgcacccgctggcgcggtgatgcggcaaacactccggcgctggacgcgacgaacgctgtcgacgacatccgccgcctgtatcgcgcttatgatcagactgtgctggctgaattcgaaccgaatactgaattcactctgcttaacgatctgatcccgttgtcccgctctgtccgtcttgaagagtcagtgtacgagtacgctcgcaccggcggccgcggctgggcgcacacctctatgtccggacagattggtgcggcgctggatgcgcgcgcgtacaccttcgacggtacgatggttccgatccatgattctggattcaaattccagtggcgtgacccgattttcaacaaaggctccgctctggcttctctggccgacgctcagcgcggttctgttgatgatgttcgtcgtcagtacgtggattacgtcttcaatggcttccgtgattccgctggcaattatatcgcctttgatggcaagacctggaagggcgttaaagccgatgagcgcgtacaggttgtcgatctcagtgcttccggcctgaatatcgacttcaccagcgccagcgcaacggcggagcaaattcgcaacgctgccatcgcgctgcgtgacgtgatgaagctgaccaacctgcagtatgcgcagcagacctggtacgtttccgggcagatcatcactaacctggagcgctacttcagcgataactaccagtcagacaccattctgctggagctgttgaagctctccggtattgctgccatcaaagaagatgcgcaactgaccggtaaccagatcctgattgtcccgcttaccgccggcgttatcgctccgattgtaggtcaggccgtgggtaccgttgcggaccctcgtcagttctacaacagcgactacgtctggcgtacctggggggcgatgggcctgatggttaagaccgatatcaacaatcgcaaatcagttatctacgcgcacagctaaggggcatttatggcactggtaaaagtggctcgagacaacctactttccggtgccaatctccagaagctggaggttggcgcgcaggtttcggtaagcggtgatgtcgctaaacgttgggcggccgccggtctggttgaaatcattagtgatgaagatcaggtgctggaagtggctacgcctgttgatgatgctgcagagcaggcagagcaggcagagcagcaggatgaatctgccagcaaatcgaagaaggcgaaataatcatggctgacccaatcacagcggcagacgtgcaggcgttcctcggtgaattgggttactccatcccggccgctctgctcgatccgattctctgcgtggtgaacaagatcatcccgtgcctcgatggtgcgggatatgacgactgcacggcaaagctcatcctgatgtatgccgctgcgctcatggcgacgtcttctggtgcccggcgaataaaatcgcagggggcgccgtccggggcgtcgcgctcgttcgattacggtgacgatggcatcacctggctgcgcgactctctggcgaaactggataccagcggctgcaccagtgaacttccaatcagcgccggcaacagtgtgggcctgtttatggtggtcgggggctgctgatggcgtgggtttcagttcagcaaaggctgccgcggacgtttacccgggtgtgggtgatcaccgataccggcgagcaaacgacggcgtacttgaaaagcgacggagagtggttcatcaactgcgaccgcatacgcgccacaggcgccgttgtgctgcgatggagggatgactgatgtcggcaaccgcgaattggtcatacaccgcgacggcgacaatctggcggcgcatacgcgatgctgacggtagcgataccgacggcggaggtcagccgtacgggtgggaagcgccgatcgctatcctctgcgactaccagggcggactctctgcaaaaatcggtgaccttggccgggagctcgttgttaaaaacacgatatggaccgagtacgcaacggcgcgggagggagattacatcctgattggcgcgtcgactgatgcagcaccgccggatgaggccgatgagattcggcagatcgtccagttcgcagatacgttcgagcgactggcggacgatttcgcactgattacgggagtctgattatgggcgctaaagttcgcggcatccgccaggccaaggccaacctcgatcgcatcatcaaagacgtccaggggcgtaaagtcgtgcgagcaatccagtctgcgatgcttatcggcagcgcgcaggccgcgctttacaccccgatcgatacgtcgacgctcatcaacagccagttcagagaaatcatggctaacggtaccagggtaaccgggcgcgtcggttactccgccaactatgcggtgtatgttcacgacccggcagtgaaacagaacttcacgcgagcaacggcccgcaaggagttcttaacgaagggcttcgaggatacccgcagccagattgacgcggtggtgaagaaggagctttcgctatgacccctccgatgtatatgcgcctcaaagacctctttgtggctgaggggcttaccgcggggtttaaggtccagtggcggcaatggcgcgacactgggaaagatactgatcagttcatcgtgttcaggccttccggcggtaccgatatcacctttgacctcggcggcgactggtatgttatggttgatgtgatctcctcgaaggccaatcccgatgctgctgacgccgcggtaaacgccatggtcgagtacatcagcgcgcaatccggcgccgatgattgcgttggcgcgctgcggcttgtcggcaatgtaccggcgccgatccccaccgaagagggccggttagtaacccggctgctcgtctcctgcacatacggcgaataatcgccagaatcacccatcaggctgccatatggcggccttttttaattgagaggcatacatgcaaggctgcgctaatgacaccggcaagctgattggtaaggtagccgtgctccgcatggcttttggctgtgctgatacggttcctgcgctttccgaatggaagcgcctcggcgccatgaccaccaagggcttcgactattccatgaataccgtcacctctgaggctgacgatacgaaaggtctggttgagaacctggtcaacaatatggacttcaccatctcaggagaaggtgagttccgtaagaaagacaagacgacggaagttggcgctattgccatctcgaaatatattttcgatgaagtgcaggccggccgacagccgacagtctgggtccgcttcgacttcactggtgaagacgctggcacttatatcatgggctacttcaacaccacttcctggtctggtgatttcggcacctctgatatttccaccttctccggagagtggaaagtagctgatgcagacacggtggtatttgaggtagctccgccggcgctggctttcaccaccaacctgccgacgaccaagagcgtgacggccggatcggctctgactatgtctgtagcggttgagggtggcacttcgccttacacctacgtctggaagaaagacggcacggttgtcagcgggcaaacaacggcgaccttcaacaaggccagcgctgcttctggtgatgccggggtttatacctgtgaagtcaccgattcttccgcgacaccagtcaagatcacgtctgcatcctgcacggtcactatcagttaaccaccaggccatttcgtgaatagtacaaagggcgttctgcgcccttgatactgtttatggagcgactatgacccctattaaagaattaggcgaatgcgttataggattcggtgaccgggaattctttttccggccgtcgttccgcaacatggcgcgcatcggagagcccgatgagattgttcaggcgttctatgacctgtgcaatgacgaggcgacgccattcgcgcagcgcgcagctgaggcctatatccgcgatgagtacagccgccttcctgattgcatcctgcggtttatgcaaagcgggctcctgtcacgcaaggcaatcatggcagcgcatacgatactgacagcttgctgtgacgatgatatcggcgatctggttggatggatgaagccggggaaatcacgcaagcgtggcttcgtctggcgaccaggtagcatgccgccggaatgtatggtcatcgtcgcgcaaaacctgatgatgcacggcatcatcggcaaagcgaaggtgcgcaagctgcagcgttacgaaacgaacgagacaaccgcagaattccgcgcagccgactacatcatggcggcccgcaaccatttcggcataagccgggaagaggctgagaacctcacgatgaccgaatttgcattactactaaacgccaaatacccgaaccagaaagggtttacccgagaggagtttgacacagtgatggaagaagatgatcgccggtggcaggcgatgatgcagcaggaacaagccagcaaaaccaaataaaccagcctcggcacagcccggggcttttttatacccaaatttcaccgcgcatctcacgcgcacttcacacagaacctttcaggatgacccttgaggataccggctggctgtcggtgcctttctgtgggccggattcctgtgagacaaggttcatcactaaaaggtaataccgatatgtctaatatcatccccatgaattacgatgaccgttcattcccttttacggcagattgctggttcaacgccacagttgctgcaaagcatcacggcaagcttccaaaggactggctaaagaccgagacgacgaaaatttatatcgccgaactggcggaggagcttggtattgctggctccggaataaaagaggatttttctccccttttagtcagggtggagaaagggcgaaacggcggtacctggcttcatccggagttagcggtggagttcgcccgctggttgtcagtcaaattcgcccgcgcctgtgaccgacacattaaaaatctgctgctgagtaaaaacttccaactcaccgaagatcagattgtcggcctgatggtctgccagcaaccaacgtcgtgggagaagcgctttaaagacccgttctaccaggctctgtcgaaaatgtccggtcttccttacttcggtcatgtcggcggttgtccggcgctgttcggccagatcaccgctcgttgggtatacggtgtcgcgcttcctgattatgtctatcaggcggcaaaacaggcggcgggcgacagcaaagagaagattcaccagcaccttaagcctgatgcgctggagaaggtcgagcagcaactggtcgccgttaccaacatcgccagttgcagcattgaccagaaggacttcgaggcccgttgcatggctgcatttcccgttaaggggcaaatgaagttgctgtatgcggcggcgtgaccatgaataaccgaatcgttgagtgcgcctccagagcggggcgcgacttctcggagttcatgaagggcgagaagaacatgatggacgcgctgcgatcggctgaagagttcaccgagcagttacgcattcatggctgcgttaatcaccacttcgtcaacttcatgatgatgaaggcgatcatgaaggtcttcgacgatatgcagcgcgaggagcagcgagaagaacgccgacgaaagcgtgcagcagccaagagtaaatagcccactcaggtgggcttaatccttgctgatgcgaattttttgaattagctcaatgatgtttttaaggtcttctggcttgaatccggatgcgcttatcttcaggtcatctagctcaattttgagatttttatgcttgtttcggtggatcaggttgcaaattgcatatcctatagctccccataaagctttagagttaactatctcaattatgatgtcctgagcggagttaaccgtaaaataatgcgtagtaatgcactcatcaaccggataggagtaggcaatgtcaccttgttcaagaatgctgataaaatcagcttccatttctgacggtatctcgattttcaaaggtgggttaggcgtggtcattgaagcgaactccctttcgtcaaaaataaaaatgtgctgctgttttttgcgcgccgccattggagcgctcagcgcaaaaggcgtggctgtcgtgttttatgatatcgatgtcgatagagcgacaaaggatatggaaagactgcgctaactattatccttgctgtagatacccttgccccattagctatgtctgccatgaagaaaaatccaggcatgtacgataatgggcaattctttgcccctggacatcatggttacaggcaatacgcgacgatcctcaagaagcagaaggacacagccggcctggatgctctccttaaaaagaaaaaggcggaaggatgggcagactaaagatgtttggtttgctacgattgccgcatcatttactgatggggatagggatatggtaagtcgtttttatatgttcattttagctgctatttttttgctaactggttgtgataacaaaccggatgccccgtttggattcaaatgggggcaaactatccaacagacaatagatcaaaaacttgcaggcacaaaagtcaataacacagggtttgtcggttttataagtgctgacaccgcaccaaaacctgcatcttttgaaggtcgatattttcttggttttatggggggactcgggttaacaagcgtctcattctcaactcctgtagatgctaatgggtacttttttaaccaaggaaggaaagtttacggtgatatgtctcagaagcttgagcaaaaatatggtagcccagttgaaattaaagaaaaggtaagccgtgatggggcagatttctatgaatgcataaaagatgagtcgtgcggcacatggcaaagaaagtatcagaaagatggcatgacaatcaccttaaacgttgaaccttcaccaggacggttaatggatgcaatgtcaaaagggtatgtaagtgtgcggtatgagtttgtgtcaaaagaagaactggataaagaagtaaagagatataaagataaaaaagaatccaacaatttctgattcatggttctaacaaagacctcgcttcggcggggttttttattgcccggagatagcaaatggctgagaacgctggcggcatttattacgatattgaaatggacgtgcagggcttgcttgtagcgcaacagcgcgttaatcaacgcctcgatctgatggaacgtggtttcgatagcactacgcgcgccgtgaataacactgagcgctctatgtccagcctgtcaggcgtagccgttgctttggccgctgctctttctgcgaagcaaatttccgaatatgcagatgcctgggcaactgtaaataacaagctggctaactcactgcggcctaacgagcaacttgctgatgtaacagagcgcgtattcaacattactcagcaaactcgcagtagtttagatgcaacggcatccctctacgcaagactggaaagggcaaccaggcagtacgggaccagcgcagatgatctggcgaagttaaccacaatcataaaccaagggtttgttgtatcaggggcaacggcgcaagaggccgagaacgcgattattcagttgtcgcagggccttgcttctggagctttgcgcggcgaggaattcaactctgtaaacgaacagggtaaccgtcttattgtcgctctcgctgactccatgggagttagcatcggcgaaatgcggaacatggctgcgcagggcaagttaacaaccgacgtggttgttaatgggcttctatcccaaggagcagtgatcgggaaagagttcgccaatacaacgacgacgatcagccaggcgctgcaggttgctggtaacaacgtaactaaattctttggcgaaaactctaccgtaaaaactggcgccgctatttttaatgatgcagttgtgactgcaagtgaaaacatagacgttctgggcgctgcattaactgcagcagcagcaattatgggaagccgctatgtcggcgcattgacaatgtctgctgcctctcagatccagtctgctttggcggcccagcgtcaggccactgccaatgcccaggccgctcagtctgcgttaatagctgctacgtcagtgaagagaaaggcggttgcagacaaagaggcggctttgtcctcccttgccttagcgcaggcagaatataatgtggccaagggtagcgcagctgaaatgcttgcgctggatgcattaattgcagctaaatcaagagcaagtgcagcatcattgtctttggcgcaggcagaaactgcacaagccgcggcatctgcacgagcagcaactgcagcaagtgctgcctcggtaggtataggccttgctcgtggagcgctttctttgattggtggtcctggtggcgcagccatgctggcagcatcagccattttctacttctggcagaaagctcaacaagccagagaggaggcgctccgctttgccgatagtctggacaaagtaaacgcctcaatgaaggcgatgaataatacccagctcaggggcaccatcgccgatgctaacgagtctattagagcgcagaaagatgaaatttccgatctgcaagcagaggttgactctttaagttctagatatcgtaatttcaccccagaagctcaagctgtagctgaatcattgggccaaggtgctgattttgcccgtcagcaggctgaggtttctgaccagttagccaagaaatcaagggatcttgccaacgctcaagataagttggcgcaaactcaggaaactgcagctgaagccaacagaacattaacaaacaacatgctcacttcaatgggtgtgcatgatgggctgatccaaaagggttggtcacttgagcaggtgcagagcgcggttgcgaaggctttcggcaacactgctgatgaaataaaccgagcaaatcaggctggacaaaacttcaaccccaaagcgctgcaggtttctcctcctaccgctgatggcgacaaagtaattcttaacctcgaagagcagaacgagttactgaaaattcaggatgaacgccaaagagcagtgacaaaagccaggatgcaggcggcgaaggttactgacaacccaaaccagatatcaaaagctggcgatctggctggagaaaactacgaccttcagaaagcagaagaagcccgtcatgaggctcagaggaagggagagcagcaagataagcgttcagcatcagctgcagaatcagtagcgcaaaaactggacaagttgcgtgccgtacagaacctatctactgagtcagttgagaagcgccgcattcaggaggctggattgcgcgccgaacagtcactagggagtggggcaactcaaaagcaacttgaagaggcgagggcgttaggagaagcaaacgagcgagcggctatatccatccagaagcgcaaagaggctgagcagggacagaagtacgccaagcaggagatagcttccgcgcaaactactgttgatccttcaactggacaggcagttgatccactggcacagattaatttgcaggagcaacaaaaacttgacgccctagctaagtaccaggaaattgataagcaaaacaccaaactgtacgaggacgctaaaactgcaatcatgcagcaggcctcttaccaacgtcaggccatccttctgcaggagcaacagacctatcagcagaatgtcagttcgcttttaggagaatcgtcgaattttgctggctccctggcggatgcgataggtcaagcagcagggaagtcgagtgcggcatatcaagcgcttttcgctattagtaaagggtttgcgattgcacaggcgtccttgaatcttcagaccgctatcagtaatgccatggctatcccgtggcccgccaatattcctgctatagcgcaagcattgtctgctggcacgcagatagttagcgccataagcggaataaactatagtggcggacgtaagaatggtggctcggtatcacctggtaatgtttaccctgtaggcgaaggaaaccttccggaactcatgcagaccagcaaaggccttttcatgataccgggtgatggtgggaaggtattcagcaacaaggatgtgacaagcggatcgccgcgtatcaagaaggcatcgacgggtagtgaataccaaagccagagtaacggcgacagcggttcagctggacctcagtcaacgaggccaatagagatcaatatccaattctacgaccagaccactggcgggcaacattcatttgcagcccaagcagtgcaagaaggtaatgtggtgacggttgatgcgttcttaaaggatcttgaccgtggtggaccgatgacatctggtatgatggataggttcggactttccatgaaagccagtgggtccttctaattatgagataaaaggaaatgccatgtcttctttcatttgcttttctacggatgaattcgcggttgtagcgacggatactcttggtgtggatgccgaagggaatccctttatccttaccaataaagcgacatatctaccaactataaaaacgattatatgcggcacaggaatgggtggatttcattcccgctgggcggaatttgtaaacagccgcatgattttattagacgtggataatcttgattaccatgctccatccacactaaaggatatgtgggaggagtataagaaggaatacaacgtaggtgatgagtgcacggtcaccatctatcatgttggaatatctcagtcatcgggaagaataaagagatttgcctaccgatcttcagaatgcttcaggtcagaggaaataactcatggttggttttacaaaccagagtgctcagtccctgacggggaagacatcttgggaattatcaaggcaatgatgtttgaacaaagggcaatacaggatgcaatgccaagtgctgaaagagtttatattggcgggcaagttaacgtcataatccttgagaaagatagcgttaggctcatgactatagccgacttccctgacttttcatcggtgatcaacaagttgttttaacttgtaactgcgcttactaaaccaaacccgctccggcgggttttttaatgcccggaggaaacgtggcaacagttcaataccctccgttcctgccgcttccccagcgcgccgatcagaacatgacgcaggatacagcctggcagacgacgcagacggcagtcggtccattgataatcacgccgatcactacggacctgaaagcaacctggacgctgcagtggatattcacgcttgcccaggccgagcggtttaagtcgtggctgcgctcgccgacatactgtgaccgcgggcgcgcctggttccagatgccgatcgacctgggtgatacgcagggcgttcagcagcagacgctgcatttcgtcgatatgccggtgcagaccagcaaaaacggcaacattgtcacctggaccgcaacggtcatcagtaacggtatcgaggacattaccgaggactacgacgactggattgttgaggcccagcctggctatggatactggctggattacctgatcaccgaagttatgccgagggccgactgatgccgacattgagagagtggaaggagcggcggccggcaagcgacatcaaacagacggtggagttttatcaccctgcgtttggttattaccgggtggtcaataacctgtttcgcccggcgacgttcggcggaaatgccttcgagcctgcgcggttcagcgtgaccgagccggcgcaggacggaacggcggtcatatccatgaccataacgtttgtcgccgcgacggagcatgtccggcagacactgaaaagctggcgcggggcggcgcgtatgacgccgattaagtgcctgtatcagcagtggaacgcgatcggtgatgcatcatccctgaaagactggacgctgtatgttaacgacatttccgccgatgccagcaacgtcactgtgaccgccggaaagactaacccgctgactctggccaactccatcatttacaccacgaaagactatcccgggctaatcaccgtatgagacagagcgactttatcgggcttgttaacggcaagccctgggctaaccgcgcctgcagttttgagcagatggactgctggggcctggtggttctctattaccggcatgtgctcggcctggaactgcatcacgttgccggctacgaatcgggtgcggatttcatcacctgctacgaacaggagcgcgcccactggcggcgtgtgtcggtggcggccaccggatgcatcgccgttttttaccgcggcgaagtgccggcgcatatcggtgtgatgatcagcccggttaagtgcctgcatgcccgcggcgaattcggtttcgtgcgctgcgacagtccgctggcattactgaaggtttacagcaaagtggagtacatggtgcatggtgcgatatgagttacagaggctgcctggcgctccgctgcagcggggaacggtagatgccggcaccacactggtgagcctgctggattctctgcagctgcaccgcgatgttatcgtgaaactgaatggccgagcgctgccagacgattacgatatcagtcggccactgcgatccggtgatactgtggctgtgttcgaccagccagaaggcggggtgggaaagctcatcaccacgatattgcgtccggtcacgaaaatcctctccggcgcgctgaaggtgttcggactgtcaaataagcctagtgcgtcggtatcggtggcgacaggcgaatcccccaacaacgacttaaccggccagacgaaccgcgcgcgactctacaaggggcgcccgaatatttacggccagtgccgcgtctttcctgacctgattcaggaagcactgttcgagttcgtcgacaacaacaaacagcttactgaatggtttgaggtcggttacggccggtacaccatatcgtcgatccgatactcggaatcgaatctcggcagcctggcgggagcaagttctgcgatttataacccgggagacgtgatcggcacgattgaagtcgggtatcagttcgatgacgtcgataacgagactgtgccaggcctgaatgaaagccaggacttcccggcccagacagcgaccacgacggtgccgacatcggtggcgatcgagagtaatcagctaaaggctgtcgtgctgtcgaacgatgacaactttgcctacttcgctgcgctggcagtgccgcatcccgtgtcattcgtcatcaatgccacctggtacgatggcggcacaagcgtcacgcggaatgtcaccggcgccgggaatattatctcctctgagagctttattggcgacgacacgctgtcgtacacgacgttttatatcggcgaactgtcgggtgaaattacatcgctgccgggcaatgcggttatcaactcgactctgttcacgctgaatgaccagacaccccttgttatcggtccgtcagtgtcgccaatcgtctcgacgcaggtctgggtgcatgtgcttgttcagctcggcgcgacggccggcacaacgcaatatcggatcaagttctggcaggtcgatgacgacaacaatcaggtgccgggcacatccgagcagcatgattatttcttcgataacgacttccaggtgacgacccggtatttccgcacaacgcacaagttcgtcccggctgtcggggcggggcgctatgcggtgaccatcgagcgcctcgataacagcaatgacgccaacgtcgtgacgctgatggcgatccacgcggttaacgtacgggaaaacgtcgtttatccggaggacacaattgcccgcatcacgattaaggggccgaacgacagcaactcaaaccgcgagcagaagtacaacatgctggcgcagcggcataccatcagctacgaccggacaaccggcgcggttgattacacgctgcggccaagtcgttcgtttgctgacgctatcctgcatgagtgggttgtcgtaggtaagcaggacatagccagtattgacgtcgccgctctgtatgccattgccgattcgctgcctgatgaggcgcttgggtatttcgattacaccttctcggatgagaaacagccgcttggtgagcgcatagcgacgatcgccaatgtagcccgcgttgatggcaataatatcggcgatgtgctgacgttctggcgtgatgagaaagtgacaaatcccgatgcggtttttgcgcgctcaaacatgttctgggacgagtacaaagtcgcctggcaaatgtctcttccgggcggttacgacggcgtggcgctggactacgtagacccgctgacgaacaaaaaggcgtacatctacctgcagatagacagcagcggaatcactgaggttgaggacgccacggttaatgcgatgcagatcagcctggacggctgccgaaacgccactcaggcgatagaccgggcctggcttgaggcgagaaaaattctctactcacgtctgaccatgacggtgaaggtgctggagtcgactcaggttgtgcgcggtacggttgtgcagtgtcctgacatgtacgacaacacccagcaaacaggctatatcaccgggcgatccggtgacgtgttttcgacctcagagcgcctcgacttctcactcggtgagatgtgggtggtgatgaccgacagtctcgggaattaccgtgggcgctggcgggcatatcctgttgacgataatccaaaggcttttgagtccgcggccgatgctttcgacctcaatatttacgaccgggttatagtccagaatgccagccggtatttcatcgcaacaaacacagaacttaactccaccatctggcgcgtagaaagcgccaaaccaaacggcgacgatactcagacgctttcgctatctgagtattcagacattatttacccgtaacaaccaaccttcgcgcacaccatcagattcacttctgagggcttcgtgcgccttttatagggcgacatgcacaatggcagaagtaccgttaccaactcccacagataacgctgttccgagcacggatatccgggatgcagtttatgccggcgccatgctggataaggttgtcaccagtaccgacctgacatacaccgatcgcctcgggggtgagcattacaccgtagacggaattaaggcggaaggagataaggttgtcgaggaaacgcggcagaacttgatccctctcagccggcagtacatgacgctggcggcggcgcaggcggatattgcgaacatccccgaagggagcacaacctattatcgcagtcctgatgatagtgcactggctattgaagttataaataatggcgggacgctggagccaaccggaaggaaaatgccttcgtatgatatggtaattcaggctgtgctcgctgaattcatggaaagatcatccattattttcgaaggtgaaaattcatccctcttgtcattatgtgattattttggttatgaggtcggaaaagtaaccgaaaatagttttgagaccagaaaggttaagatagttcagatggactcaggaccaggattcatgctggttgatgattttggtaatgcggtagatgttttgtcagaaagatttactttggttgccggaaataacgagctgacagattcagagtcgcttctttccttccctgacgaattcggtaacgagctgattcttgtagacagcaaaggaaggcaaagggtaggtgataatcttatttttgatgcaccagactgggcgcaatgtacaaccgaccaatttggatttgtaatatttgggtataaattagatggcacatttgtgggaaaggataatggcggaagtggtggcgagccagttccgtcaattcttgaaaccggctctgtcgatcactggctttttggttatcctgacacatctatggtgggaagggttcacggaagaatcctctcacctcagtcaacgccagaatttaataaaaactatgtatctctgtcagcatggggaggggctttagttacagatattcctgatgcaggggaatatacagtttgtgcagtagttagaattcctgttcaatctccgcaaagtgattgcgtggtagtatatggcacccaaaatgggtattcgcctcgtgacgatgacgatacctatactggaaaccagatctctctcttttctgacagagacgaccgtcgctgggttcgttcaaaaacatccggatacagagccacttccagacgctacccattcgatcagactccggtagataaatggctatttatctcgcatgtagtaaaactaacaggttctggtcaccgctatcaggttattagtattagcggcgagtattatcaggtgctaagagaggctgatactgacagacttatattgtctggcaggaatattgccattggtaatgcgtactgtgatgtatctatgtttaaaactaaaggtcttgatgtagctgagtttatttatttcgattctgcattatcaatgcaggatgttaataccgtttatcttaattctcgtcagcgcatggctgaaagagcaatcaacttacagtaaggggatattcatgggcgttgcaattatggcagcaggtacggacgcagcagcatattctaataattatattccaccggtagccagccctctggtatggggaaaccttgagagttctgcgatccctgagtcaagacgtagcaaaaactgggggagtgctggcggtaatttttcattgtcaggtaacgctgcattttcatctgtaggcgtgtcagcagcagccggagtagacagccgtttgactttaggcacattttcacctgatgcttataccatgatcggtttggtcgatgttggtgttagcgctggtattatgcgccatcgggatatccgccttactaccagtgcagataaaaaactcgggcgctcaatgactgcagggagcgtcgtgtcagatatagtgttgccggcaagcggcgcatttgttgtgtttttacaaggcgatttaactggacatgtttttggcatggcgacgcgaaactcggtaaccgcggcgactgccagcactgccgttaatacaggcacctcatccacattccttggtggaagtaatgccagcagtgcatttgcagcgtggtcagggtatggcgtagcgttatatccacgcaaattaagcaatacagagatcatgctggttgctgagcgccttcttaaaagagctgcgtatctgggggtaacggtgaatggctgatctgtcgatctctgtaatctctgatcaggcctctgaaagcaatcaggcggggtggtggcaccccgtcgatagttttcagggccttgaatactatgggctgtgcaaagaatttggcacggctggttatcatcaggtcgaaattgtaaggcgtgatgcggatggtaccctgacaagaggtttgtgtaaaaacactgatggtaccgtggcgtcatatgttaatgatgttgggcataatcagccctctgtagtcgtggatggcgctggctacattcatgtatttacatcaatgcatactaatttgttgcgctacttcagaagctccctcccgggcgatgtaagcaccatggttgatgcaacaagggatttccctgatgttgaatggacatgtacttatcccatcgttggcagggcacctgatggtaatgtttttgcaatgttacgcgcatcagatagaagtctgacaggagaaattaagcgcgcatcatttctttatcagtatgatattacgagcaggctgtggagtcgctttgcacatgttgcagagcaggaccagagggcggtttatcctgacgacatgcatgttaattcagctggagtccatttaatctacgaatgggcaaaatatgaagcgtcagcggtccgtcatgttggagagtacggagttataggcaatgatgggcttatgcgaaatgtgtctggaactgtttttgacatgccagtaacgcagggtcagcttgcttataaacctctttatccaggagaagacccaaatatcagtaatgcactgattatagggattcagtcagcgaagtttgctttctctggtgaatctttgtcccacataaccttcaggtttagagaaataaacgatcctacaggaactgcatttacaaatttcagggtaaaaaattctatatggaatggaactgcatggatcgaagaagaactcgcgtatgttccccctgaaatcggcaatacgtctgctgctctggcggcgacggttcaaggagtcaaaaaacgggtttacttttcggtggaatatacttcttcagggagtactgtcgctgtcatcgtccttgctgaaaatgcaggtacaggatgggtatattcaatacttggtgactccgcgcctacacttctgcgtttggggtcagcaccaggggtaggtggggatgtgatttacgtatcatcaccttacagcggaaaggtaagtcgctattttgttccatcagactacacgccatcaacttcttacacaaacttcaacgaccttcttgctgcgcttacttgatatctgctccatgtattaataggtcaatcctgcattgatccaattgagggcgaggccctggacgatgttactgtcgccggcgtcgtgacgttcacaatctgcgatgttcgttctgataattcgattatttaactggggtatatatggcactgaagctattagccaacaataacgcaaagagtgtactcgctgcgggtattagcgcgtccgctaccgttattaccgttgggacaggaacgggggctttatttccatcgccggtatcaggagaaagttatttcaaattaacgataaccgacgcagccacgaaaacaatttccgaaatcatgcacgtcacgtctgtttctggtgatgtaatgacggtaattcgtggtcaggaggggaccactccgcgagtatggtcaacaaacgatattgcggcaaatatgatgactgcggggtctttactttcctgtctgcaagtatcaaataatttctctgaaattgcagatgaaggaagtgaagctgtaaagcaggcgctattaaatctcgggtcgtcagatggcacgattaatggtcgccttattggctttccgcgcgtcgttacgagctccggatcatttacaaaaactcctggtgtaacaaaatggaagattagaattttgggaggcggcggtggtagctctgctgcaccggctaccggttctggtcaagtttcgataagcaatggcggcggtgctggtgcatacgcagaggggatgtatgatgtatccgcattaacctcagtaatgattactattggtcagggcggcaaaggtggtactgcatcatccatttatggggaggacggagggactagctccgtcggagcgctgatttccgctccaggaggcaaagcgggcctccctgcggggccggctaatcctccatttcagccagtagcgaacacaaactcaaacagccctaccggctggaatattgtcgggataagcggtccgggatcggaatgtgcatcagccatttcaactgaatatgcaatcgcctcgcgcggggcaaatagccaacttggcgtagggggatcaattcctgccataaataatccagcgaacaatggcggtggatatggcggcggggcatctggatgttccaatggcccttcaatgcctgtgaatcctggtgcagatggtcagaatgggatcgttataatcgaggaatacgcctgacatcgtgctggatagctgctcgcagattttggcatctcaggagatggcgcggatggcatcctgatcctggaagaattcgcgtaatggcttactcgcctgcgcgaccatcgatgtaatcagcccaccactgcatcatctccctgcgcttatccagatactgagcatggttgtaaattccacggattgaaccgctggcagtgtgcgcgagttgtttttcaatcgcgtcagctggccacccatgctcattcattattgtgctgaactgatggcggaatccatgcccgctcgccagcccctcatagccaatctgtcggataactaataatacggcattctcgctgatgggctttttcttatcattccgcccggcgaacacaaaagaggaaacagggcttgtgatcggtttgagagtattcaggagatttattacctgatctgacatcggaaccacatgaacgcggcgccccttcattacttcttcgtcgatggttatcatcctgttttcaaagtcgacgttttcccattgcatagaacggagctcttttgtgcgcagcgctgtatattgcaaaacctgtgtggcaattttcgaaataatacttccggaaaagccagatagcgcgttattgaatgctggtatctgatctgcaggaaggaaagggtagtttttctttctatatcccttcatggcatcagcaaggtcaggcgccggattatatttggcccggcctgtaacaatcgcatacctgaatacctcgccacatcttcttctggctttatttgccctctccattgccccgcgctcttcaaacctccggatcacctccagtatttgcatcggctcaatgtcctgtatttccagatatccgatcattggcagaatatcgtcacggaacatgcgagaaagttcatccgcatatccttctgaccaaacctgccgcttgtggtcgtaccattcatgataaatagctgaaaatgaattgtccttcacagacaactttttggccttaaccggatcgaccccgacagaaacatccttccttgcagtccacgctttatccctggcttcctgcaatgacatgagagggtatttgcccacagtcagcaccttctctttgccgtcgatcttatagcgcagctgccacacctttttgccagaaaccggaacgtacaggtacaggccattgctgtcgagcattcggtagggtttgtctttaggcttggctgcctctatctgcttaacagtgagcatgggtaaaattccggtgggtaaagttgttttactcgttttttacccgccaaaaggcgcggttgtcaacggtctgaggcgaactactgcgaacagagatttcatgagaggcttgatactggcgggattcggcggactatgacgaattgctgcgaactcaaaacaagtgtcccctgcaggaatcgaacctgcaactagcccttaggaggggctcgttatatccatttaactaaggggacaaggcggcacgagtatagcgttttttgcccgcctgagtaagagccataccgtctgactgcttaaaccctcgccactcagggcgctttttttatgcccggtcggcctttttccctttctccgccgcctgggcgcgggcttccgcttttcgcttgctgctcatatcgttacggatctgcgcatggctcagcagtgcgaagatgaaggtcccgccacagatatttcccgccagggtcggcagggcgaacggccagataaagtcgctccagggcagatttccattaaacaccagataaaggatctcgaccgagcccaccacaatatgggtggtatccgccagggcgataagccaggtcatgagaataatcaccacgattttggcggcgccggcgacaggaaacatccagaccatggtggcgaccagccagccggaaataatcgcattggcgaacatctctgtcggactgtttttcattacgtcttcggcgatgctgacaaaggcctgacgggttggctcatcaaaaataggcatataattgaaggcccatgcggccaccgcggtaccgatgagattgcccgccagcaccaccgaccatagccgcatcagcaaaccgacgttaccgagggtgggattatgcatcactggcagaacggcggtgaccgtattttcagtgaacagctgctggcgggccataattacgataataaagccgaaggtgtagccgaggttttccagcaaaaaaccgcccgggatcccctccagtttgacgtgaaaaattcccttcgccagcagggaggcccccatcgacaggccggccgcaatcgctgaccatagcagggccagcgcatcgcgctccatctctttttccccttcctggcgaatatgttcatggatcgccatcgcccgcgagggaaggcgatcttcatttacttcgatctcttcaccacgctgattttcctcactttccacttctctttcgtcatcctctgcctttaatttgttattgtctagttcatccatttcgtggccctcgctatcaatctgtatagttatagcgtagcggctttccctgccgtctggctgggcatactctgaaatcgcaaaaatggtaacgtcagatttttgtcgctccggtagaataggagccccgcgatttcgttattcccaggctaagatcaaatcaacaacttgggtgatatagacatcgttcaacgtgctgttacaatcgctcacatctttacgggcggaagcgttgtctttccgtcatggatggcaactcgcgatagccataaaaaccagggagacatctatgaattatcgcctgtcggcgcttgcgcttggcgccacattgctggtgggatgtgccagttccagctctggcgatcggccgcaggggcgctcagacccgttagaagggtttaaccgcacgatgtttaatttcaactttaacgtggttgatccttacgtgcttcgccccgtcgcggtggcatggcgcgactacgtcccacagccggcgcgcaacgggttaagcaattttaccagtaacctggaagagccggcagtgatggtgaactacttcctgcagggcgacccctataaaggtatggtgcattttacccgcttcttcctgaacaccattctcggtatgggtgggcttatcgatgtggccgggatggcgaatccgcagctacagcgggttgagccacatcgtttcggcagtacgcttgggcattatggcgttggctatggcccgtatgttcagttgccgttctatggaagctttaccctgcgcgacgaaggcggcgatatggccgatggcttgtatccggtgctctcctggctgacctggccgatgtcgatcggtaaatgggcggtggaagggattgagacacgtgctcagctgctggattccgacggcctgctgcgccagtcttccgacccttacattctgatgcgtgaagcctacttccagcgtcatgactttatcgccaacggcggtaagctgaccccggcggacaacccgaatgctcaggctattcaggatgagctgaaggatatcgattcacagtgatcggcgaatgataaaaaaagggtgaacataatgttcacccttttttgtggcgcgctgcttatcagaagcggtagttgaagttagcgccgtacagccaggcggttccttcggaacggaaggtatacgggccttccttaatttcaacatgctgcccgtgcatgtatgaaacgccgacgtcaaccgaggcatctttattgaacgcgtaggtggtacccgcgctcagccacaggcgatcctggtccggaatagagatagagcggttattagccggcaccgggctgtcatcgaaggcgataccggtacggaaggtccagttatcgtcataataataggtggtccccagcgcaagacgataggcgtccttgaagccttcctctttatagaacagcgtctggccgttgctgccggtggctttcagctcctggaactgactccagctggtgtaggtcaggctatagtggaccgcccactgcggcgccacgcggttatagccggacagctcccacatttccggcaggttaagggttagcgaaccattggtcgtctggccgctggtgcccgccggcaggccgaagttgccgaggatctggttataggccgccggcaggctgctgcggtagttaccgtcgaagtcgatcttgacctcagaacggtaggttaaaccgtagcggttattcttatccagctcatagaggatcccggcgttccagccgaagccccacgcgttgccattaagatgggcgatctgcgtgtcggccgggatcttcgctacctggcccgccagcgccggcggcagcgcgccagagcctgcgacaatctgccccagatcgcctgcatagcgctcgatcttcgccttggcgtagaccgcgtcaaagcctaagccgaagctccagttgctgtcgaggcggtaggcgccgctcaggttgaagttcgcggtggtcaggtcggttttaccgcccatgctgccggccgcataatcatcgttatactctgttgccagaccatagttagaggtgatagacgccccccaaccaaattggtcgttaatcggcgcgacaaagtggaagttgggcacccacgccgtcggggcgatattgtctgctttcaggctcttgccggtgggagaggtgcccgaaacattaacgcccgggtcgacaaacacggcgcccgccgacatggtcgggcggtcaaacatcataattaatgccgggttacgactggcattaccagcatcgtcagcgatcgccccttcaccggaataggcacgacccagccccgatgcagagaattcgttgagctggaagcctgctgaccaggcctgggtggaaacaagtgcgacagccactgcaagggcagattgggtaaagcgggttttctggctcatgcccataacctcattgagttatttttttttaaactatgttacatgccgtaacagaagcgcgggagtgtagggtctgcggtacaaccaagaaatcagaccagtgcgctgagtataggtctgaccagatgatttgttgcaagtatgtttatgaagtttttcaattgtgataacagaaacgcgatccagctggcaaaaatctcggagagagcaagggggacagaaggggatttttgttttagatcatttttaagtgtgatttctgtcacttaacgccggcagagcgattctcggctggaggcttaccggggacagggcgtaaaatagacacataatttttctggcaccgaaggtgcatctccagaggaaatctacgatgagtaaatgtagcgctgatgaaaccccggtttgctgctgtatggatgttggcacgattgttgacaacaccgactgcaccgcctcctacagccgcgtattcgccaaccgcgctgaagccgagcaaacgctcgccgcgttaagcgaaaaagcccgcaatgtcgaatctgagccgtgccaaattaacccaaccttcactgacgttgacggcggtgtgcagctggatatcgattttgttttcagctgcgaagcagaatccctgatcttccagctgggcttacgttaatccttccccctcgacgcccctgataaggggcgtttccttttcttttcactgtgttttggctcgcaattttgcgcttctccgattggcttaatgtaaaaaattagttaagaatgttatcaggtcagaccacttggttgtcttggttaacaggggagtgttatgagtcaggcattaccgcttatcacccgtcagggcgatcgcattgccattgtcacggggctacgcacgccatttgctcgtcaggctacggcttttcatggcgttccggccattgatttaggaaaaatggtggttggcgagatgctggcgcgcagcgacattcctgccgaagtcatcgagcaactggtctttggccaggtggtgcagatgccggaagcgccgaacatcgcccgggaaattgtgctgggtaccggcatgagcgtacataccgacgcctatagcgtcagccgcgcctgcgccaccagtttccaggccgtggcgaacgtcgctgaaagcctgatggccggcaccatccgcgccggtattgccggcggcgccgactcctcctctgtcctgcccattggggtcagtaaaacgctggcccgcacgctagtggatgccaataaggcacgcacgctgagccaaaagctgaagctgttttcccgtctgcggccacgcgacctgctgccggtccccccggcggtggctgaatattcaaccggattgcggatgggcgataccgccgagcagatggcgaaaagctgggggatctcccgcgagcaacaggatgccctggcgcatcgttcgcaccagctggcagcgaaagcctgggaagagggtaaactgtccgcagaggtgatgaccgcctatgctccccctttccgcgaaccgctcgagcaggacaacaatattcgtaaaaattcaacgctcgcagattatcagaagttacgcccggcctttgaccgcaaacatggcaccgtcaccgccgccaacagtacgccgctgacggacggcgcggcagcggtgatcctgatgaccgagtcgcgggctaaagagctggggctgaggccgctgggctatctgcgcagctacgcctttaccgccatcgacgtctggcaggatatgctgctggggcccgcgtggtccacgccgctggcgctggagcgcgctggcctgacgctggcggatctcacgcttatcgatatgcacgaagctttcgccgcgcagacgctggccaatctccagtgtctggcaagcgaccgctttgcccgcgaggtgctgggccgctcgcaggccaccggtgaggtagatgaaagcaagtttaacgtcctcggcggctctatcgcctacggtcaccccttcgccgccaccggcgcgcggatgatcacccagacgctgcatgagctgcggcgacggggcgggggatttggtttggtgacggcctgcgcggcaggtggtctgggtgcggcgatgatcgtggaggctgaataatggatactgtttccgcttttaagcttgaggtccgtgcggacaaaatcgcggtgatcaccattgatgccccgggtgaaaaaatgaataccctgaaagccgaatttggcagtcaggtacggggattgatacgccagttacgtgacgataagtcagtgcgcggcgtagtatttatctccgccaaagcggataactttatcgccggcgctgatatcaacatgattgcccgctgccgcagcgcgcaggaggcggaagcgctggcgcgccagggacagcagattatggctgagatccatggcctgtcgatcccggtgattgccgctatccacggcgcctgccttggcggcggtctggagctggcgctggcctgtcatggccgtatctgtagcgatgacgaaaaaacccgactcggcttgccggaggtacagcttggcctgctgccggggtccggcgggacgcagcgtttaccgcggctgatcggggtcagcaccgcgctggatatgatgctcaccggcaagcagctgcggccgcggcaggcgctgaaggccggtctggtggacgaggtggtgccgcaggcgattttactgcaggcggcggtggagttggcgctgaagggacgaccgaccagccgggaggtgcctgttcgtgaacgcgtactggcagggcccctggggcgccatctgttattccagtttgtcggtaaacaaacgcagcgcaaaacgcagggaaattacccggcggtgaagcgaatcttgcaggtcgtcgagaatggtctggcccatggctgcagcagcggatacgctgaagaggcgcgcgcatttggcgaactggcgatgagcccgcagtcgcaggcgctgcgatcgatcttctttgccagtaccgatctgaaaaaagaccctggcgccgaggcgggccccggttcgctgagaagcgttgcagtactgggcggtggcttaatgggcggggggatcgcctatgtgaccgcctgtaagggcgggctgccggtgcggattaaagatatccagccgcgtggcatcaaccacgccttaaagtacagctgggatctgctgaataaacaggttcgccagcgtcgattacgcccagtggagcgcgatcgtcagatggcgctgatctccggcactaccgactatcagggctttgctcatcgcgatgtggtgatcgaggcggtatttgaagacctggctctcaaacagcggatggtcagcgaagtggaacaatacggcgggccgcagaccatctttgcgtcgaatacctcatcgttgccaatcggcgatattgccgctcacgccagccgccctgggcaggtaatcggcctgcattttttcagtccggtggaaaaaatgccgctggttgaggtgatcccacacaagggaaccgacccgcagactatcgccaccgtggtgcagctggctaaacggcaggggaaaacgccgattgttgtcgcagataaagcggggttctatgtgaaccgtatcctcgcgccgtatatcaatgaagcgatgcgcctgctggtggaaggcgaaccaattgaagtcattgataacgcgttggttaaattcggtttcccggtggggccgattcaactgctggatgaggtgggtatcgataccggcaccaaaattatccccgtgctggagagcgcgtttggagaacgttttagcccgcctgcaaacatcattgacgcgattttgaaggacgatcgcaaaggcagaaaaaataatcgtggtttctatctttatgagacaaaagggcgtaaaagcaaaaaacggcccgacccggcagtctatccgctgctcggcatcggccgcccgcagtcgcggctttccgcgcagcaggtggcggagcgctgtgtgatgatgatgcttaacgaagcggcgcgctgctttgatgagcagattatccggagcgcgcgcgatggcgatatcggcgccgtctttggtatagggtttccgccatttcttggcggcccgttccggtatatggatactatcggcgcgggtgaagttgccgcgatcctgcagcgcctggccgcccagttcggcccacgttttacaccctgtgacactttattacgcatggccgaacaggggaccaccttttggccagcggatgaacggctgacctaagttgtggtcaaagaaggtaaatccggctgcggacgacgctgttgattggctgttttgtaaacaatgattgactatacttacgccattgaggtaaaaaacagcgtttcattcgtggaatggatcaggcacaatgcccggccaccgggtcacctgcgtattgtcttcgcaggccaaactacggtgcttctggttaacaaaagcggtgcaatatgcaagtttttattatgcgtcacggcgacgctgccctcgatgcagccagtgactcggttcgtccattaaccgtatgcggttgtgatgagtctcgtcagatggcaacctggctgaaaggtcaaaaagtggatattgagcgcgttcttgtcagtccctatctgcgtgcggaacagacgctggatattgttggggagtgcatgaacctgccgaaacatgtcgacgtgatgccggagctcacgccgtgcggtgatgtgggaatggtgagcgcctatctgcaggcgctggcgaatgaaggcgtggcgacggcgctggttgtctcccacctgccgctggtggggtatctggtctcagagctgtgtccgggggaaacgcccccgatgttcaccacctcggctatcgcctgcgtgacgctggatgccgacggcaaaggtgagttcctctggcaaaaaagcccctgcaacctcaagatggccaacgccatctgacggccccccggagcccgccgttacggcagctccggcggttgccactcctcgacctcaatcaatatcagcagtgcggcgtcaccgccgtactcttttggtgcctggtgaaacgccataatatgcggatgttgcgccagccacagcggggtttgctgtttgaggatgtgtttcccgtgcccgtgcatcacgcaggcgcaaaacacatgctcgcggcggcaggcggcaattagcgcgcccagttcctgtttggcctgctgctgggtaagcccatgcagatcgaggaacagctcaggcgaataatctccacggcgcagctttttcagctcgaaatggctgacgtcggggcggacatatttcgtcgagccttcggtattcagtagcggttgaaactcatcggaaaaatagtggctgttatcgacctgttcctgcagcaaacgcttaggagcaacctcggtaattttcttgcgctgcgggcggtgaacaatagtgtcctgtttgatcttccgcgtgccggtcatcagctgacggaacagcgcctgatcctcctcgctaagcgatgtcttctttttcattgtccgctctcattcatactttgcgctagtttacccgactcaatatcccttcgggcaaggaaaacctgttttttcccccgccccttatcgcaagaatgctgatttatcgccgtcttcatggcacactagccgccgaatttatagcagagtgtgccctggaggatgtcgtggataaaatttttgttgatgaggcagtcaatgagctgcataccattcaggacatgctgcgctgggcggtaagccgtttcagcgctgctaatatctggtacggtcacgggactgataacccgtgggacgaggcggtacagctggtgctgccttcactgtatctgccgctggatatcccggaagacatgcgcactgcgcgcctgacctccagcgagaaacaccgcattgtagagcgggtgattcgccgcgtgaacgagcgtattcccgtcgcctatctgaccaacaaagcgtggttctgcggccatgagttttacgttgatgagcgggtgctggtgccgcgctccccgattggcgaactgatcaataaccagtttgccggactgattaaccataagccgcagcacatccttgatatgtgcaccggtagcggctgcatcgccatcgcctgcgcctatgccttcccggaggcggaagtcgatgcggtagatatctccccggacgcgctggccgtcgccgagcacaacgttgagtcccacggcctgatccatcacgtgacgccgatccgttccgacctgttccgcgatctgccgaagctgcagtacgatctgatcgtcaccaatccgccgtatgtcgatgaagaggacatggccgatctgccggaagagtatgagcatgagccggtgctggggctggcctccggaagcgacggcctgaagctaacgcgccgtatactcggcaacgcgccggattatctcagcgacgacgggattctgatttgtgaagtcggtaacagcatggtacatctgatggagcagtatccggacgtgccgtttacctggcttgagtttgataacggcggcgacggggtctttatgctgaccaaacagcagctgattgacgcccgtgcgcacttcggtatttataaagactaaaaaaacaacacgccaacataacgaaaaagattggagccgtgatggcaggaaatacaattggacaactctttcgcgtcactaccttcggcgaatcgcacggtctggcgctgggctgcatcgttgacggcgtgccgccgggcatcccgctgaccgaagccgacctgcagcacgacctcgatcgtcgtcgcccgggtacctcgcgttacaccacgcagcgtcgcgagccggatcaggtcaaaatcctctccggcgtcttcgaaggcgttaccaccgggaccagtatcggtctgctgattgagaacaccgatcagcgttcgcaggattacggcgcgatcaaagatctgttccgtccgggccacgccgattacacctacgagcaaaagtatggtctgcgcgactatcgcggcggcggtcgttcttctgcgcgcgaaaccgcgatgcgcgtagcggccggggcgattgccaaaaaataccttgccgcgaagttcggcatcgtcattcgcggctgcctgacgcagatgggcgatattccgctggccatcaaagactgggaacaggttgagcagaaccccttcttctgtccggacccggataaaatcgacgccctggatgaactgatgcgcggcctgaaaaaagagggcgactccattggtgcgcaagtgacggtagtggctgacggcgtaccgccaggcctcggtgagccggtcttcgaccgcctggatgccgatatcgcccacgcgctgatgagcatcaacgccgtgaaaggggtggaaattggcgacggcttcgaggtggtgaagctgcgcggcagcgaaaaccgcgatgaaatcaccaaagccgggttccagagcaaccacgccggcggcattcttggcggcatcagcagcggccagcagatcgttgccaacatcgcgctgaagcctacctccagtattaccgttcccggtcatacgattaatcgctttggcgaagaagtggagatgatcaccaaagggcgtcacgatccgtgcgtcggcatccgcgccgtaccgatcgctgaggcgatgctggcgatcgttctgatggatcactttatgcgtcagcgcgcgcagaatggcgacgtgacgacgacaattccacgctggtaaccatgaaaaacaccgttatcgcactgcttgcgctgttggccagcgccggtagcctggccgccacgccatggcagaaaataacccaaccgatcggcggcagcgcccagtcaatcggcgcgttttccaatggctgtatcgttggcgccgaggcgctccccctgagtgcccccggctatcaggtgatgcgtaccgatcagcgtcgctacttcggtcatccggatctggttcagtttattcagcgcctgagtaatcaggtgcacaataaaggtatgggaaccgtgctgattggcgacatggggatgccggcgggcgggcgctttaacggcgggcacgccagccaccagacgggcctcgatgtcgatatcttccttcagctgccgcaaacgcgctggacatcgtcccagctgttgaagccgcaggcgctggacctggtcgccagcgatggcaagcatgtggtgccgtcgctatggagcccgcaaatcagccagcttatcaagctggcggcggaagatagcgaagttacccgcatcttcgtcaacccggcgattaaacagcagctgtgcctggacgcgggcagcgaccgccagtggctgcgtaaagtccgtccctggttccagcatcgcgctcatatgcacgtccgactgcgttgcccggcgggaagtctggagtgcgaggatcaggcgccgccgccgcccggcgatggctgcggagcggagctgcagagctggttcgaaccacctaaacccgggtctaccccccctgtgaagaagacgccgccgccgctgccgccttcctgccaggcgctactggatgagcatgtgctgtaatggatagttttatcgagttgtttgccgtatcgccgctggtgctggtggtactcttctttgtcgccatcctggccggttttattgactcactggcgggaggcgggggcttattgactgtccctgcgctgatggcggccggcatgccgccagcccaggcgctggcgaccaataagctgcaggcctgcggcgggtcgctatcggcgaccctctattttgtccgccgcaaggtggttaatctggccgatcagaagctgaatattctgatgacctttatcggctcaaccgccggagcgctgctggtacagcacgtgcaatccgatattcttaagcagatcctgccgttgctggtgattggcatcggcctttatttcctgctgatgccgaaactgggcgaagccgaccggcagcgtcggctttacggtctgccgtttgcgctggtcgccggcggtagcgtagggttttacgatggctttttcggccccggcgccggttcgttttacgccctggcttttgtcactctggccgggtttaaccttgccaagtcgacggcccatgccaagctgctgaacgccacctcaaacgtcggcggcctgctgctgtttatcatcggtggaaaggttatctgggccaccggctttgtgatgatggccggccagtttattggcgcccgtgccgggtcccggctggtgctcagtaaagggcagtcgctgatccggccgatgatcgttatcgtctcggcggtgatgagcgcgaaacttctttatgacagccacggggctgagattttgcagtggttgggaattcattaatgcaacagcaacaccattatcagcagctgatagaccttttcgacagctgctttgccgaagaatttaatacccgcctgattaaaggcgacgatgagccgatctaccttccggctgacgatgaaacgccctatcaccgtatcgtgtttgcgcacggattttttgccagcgccctgcacgagatctctcactggtgtgtcgccggcaaggcgcgtcgcgaacaagtagattttggctactggtactgcccggacggccgcgatgcgatgacccaaagccagtttgaggatgtcgaggtgaaaccgcaggcctttgagtggctgttctgcgtggcggcgggatttccgtttaacgtcagctgtgacaatctggaaggggacgttgagcccgatcgcatcgccttccagcgccgggtgcatgctcgggtgatgactttacttgaacaagggatccccgaacgtccggcgcgctttattcgcgcgttacaacactattatcaaacgccgccattgacggcgaaacactttccgtggccggaagacctgcactaaggccgcacattacatgacaagaggtaagatgatgatcgcggagtttgaatcacgcattctggcgctgattgacaacatggtagaccacgccagtgatgatgaactgtttgccggcggttatctgcgcggccacctgacgctggcggtggctgagctggaaggtgagggcgagcattctgctgacgcggtacacagcagagttagccagagcctggagaaagccatcagcgctggcgaactgtcgccgccggaccaaattctggtgcaggggatgtggcataacctgtatcaacaggcgaaaaatcaggcctgagccatgttgtagcccgggtcaggcgtcagccgtacccgggaaattgcctgccctcatggttttatttcaccgcttttcccttcagcagttttctcacccacagccgattcggattcagcgccgccagggtgtcgctatccagcggcagcggttccgcgctcatttgcgccgccagcagctcagcgcttaacggcgcggtgcaaagtccgcgcgacccgagcgcgccaagcataaacaggttacgacagaccggcgcgctatcggcgatatccggttgttcgtggaggctggcgtattgcgtcaatgttgccgcgtagtccggcacgttgccgaccatcggtagatgatcgcgggtggcgcagcgcacgccgcagcgagcgtcgttggcgctgatatccacgtcctgtggccactccgcgcccgggaagcagtcgatcagccgttgccggttgtgctgctgatcttcttcgctgaaggtggtgtcggttttcccgcggtggtagctggcgccaatgcagtgctgctgattttgcggattctgtggcgtcaggtagccgtcgtagcacagcacctggcgcagggcggcaagccgcggggtggtgggaatatggctgacctggccgccaaccgggtagaccggcagttgggcggtttgcgcaaaaccagtgatgcggtggccgttcgccagaaccaccgcctgatgatagcgctgctgattgagcagccagccatcgccctccgcgctgagcgtttcgacgggataaccatagtgcacgtgcagtccgcgtgtggccgccagcgccagcagctcggcggtgagctgctgcgggcacagccagccgccggccggataggtgatgccgccgcagccggtatcgacgccggtcagcccggcaacctgttccgccgtcaccgcgcaggcgatgtccgggggtaaattcagcgccagcatctgggcgattttatgcgcgcttttctcatcccagccgagctgggtaacaccgcaccattggtgatcgaacatcaccggcagcgcgtcatacattcggcgggcgaaggtaaaggcggccggaaaaaagcgtgccagcgccggatcgtgctgacttaacagcggatacagcgcgccctggcgattgccggaggcgccctgcgctggagcctcatcggcgcagtaaagggtcacctgccagccgcggcgcagcagcgccagggagagcagggcgctggcgatcccgccgccgatgatggccgcctcgcgggcatcgctgctactgcgagcgaaccaggggacgcgcgcaggaaagctcagcgtttgcgccatctcgccggtcagcatctcccgcttgcggccgaagcctttgcttttacgcatggtaaagccggcctcctgcaggccacggcggacaaaaccggcggaggtaaaggtggccagcgtcccgccgggtcgcgccaggcgcgccatggcgctgaacagatcctgagtccacatgtcgggatttttcgccggggcaaagccgtcaagaaaccaggcgtccacctgctggttcagcgaatcatccagctccctggtcagctcattgatatcgccaaaccacagatcgagcgtcacccgcccgccgtcgagcagcagacgatggcacccgccgaaggccgacggccattgcgcctgcagctgctgcgcccacggagccagctctggccagcgctggtgcgccaggcggagatcctcagccttcagcggatatttttcaaaactgatgaaatgtaacctttgcaaggtaacgtccgggttatcacgaacaaaaacgtcaaacgcctgccagagggtgaggaaattgagcccggtgccgaagccgctctccgcgacgatcatcagcgggcgagggtggctggggaagcgctccggcaggcgatttccgccgagaaaaacgtagcgagtctcttccagaccgttgtcattggaaaagtaaacatcgtcgaaatctcgggaaacaggtgtaccctcagcgttgaattccaggttggcgggttgtatggcgttttgtttcacgtaagttactcgaatcacaaggcgtagcacgatcttaacgatgtgtgcctgagggcgcaaatttatacacaaaatgtctgatcggacttgttcggcgtacaagtgtacgctattgtgcgacacgaaacttaaaatagtgcgacttacagaggtatttaatgaaacgtgcagtgattactggcttgggcatcgtttccagcatcggtaataaccagcaggaagtcctggcatctctgcgtgaaggacgttcagggatcactttctctcaggagcttaaagattcagggatgcgcagccacgtatggggcaacgtcaaactggataccactggcctcattgaccgcaaagtagtgcgctttatgagcgacgcctccatctatgcttacctgtccatggaacaggctgttgccgacgcaggtctggcgcctgaagcatatcagaataacccgcgtgtcggcctgatcgcaggctccggcggcggttccccgaaattccaggtcttcggcgccgatgccatgcgtagcccgcgtggtctgaaagccgtgggcccgtatgtggtcaccaaagcgatggcttccggcgtttccgcctgcctcgctacgccgttcaaaattcacggcgttaactactccatcagctcggcctgcgccacttccgcccactgtattggtaacgcggtagagcagatccagctgggcaaacaggacatcgtctttgccggcggcggcgaagagctgtgctgggaaatggcctgcgaattcgacgccatgggcgcgctttccactaaatacaacgacaccccggaaaaagcgtcccgtacctatgatgctaaccgtgacggcttcgttatcgccggcggcggcggtatggtcgtggtggaagagctggaacacgccctggcgcgtggcgcgcacatctatgccgaaatcgtcggctatggcgcgacctccgatggcgcggacatggtcgccccgtctggtgaaggcgcagtgcgctgcatgcagatggcgatgcatggcgttgatacgccgatcgactatctgaactcccacggtacctccactccggtcggcgacgtgaaagagctgggcgccatccgcgaagtattcggcgacaacagcccggctatttcggcaactaaagcgatgaccggccactcgctgggcgcggcgggcgtacaggaagccatttactccctgctgatgctggagcacggctttatcgcgccgagcatcaacgttgaagagctcgacgagcaggctgccggcctgaacatcgtcaccaaaccgacggacgctaagctgaccaccgtaatgtccaacagcttcggcttcggcggcaccaacgccacgctggtgatgcgtaaatacaacgcctaatcagcatgtgatgcgcaaaggggagccaccggctccccttttttgtcatcttgacagggtaagagcccgcaggcacactgctcgcggatccattagtctctccactaatgcgtaagcgtttaacgtcaaccaacgcgccttaaccctgataatcaggtggagggggcgtgtcgttttgctcgccttactctgcgaatctggagtaatgcatgtccgcagttactgaaacaacatccaattcttcggcgaatttttcgcttttccgtattacgtttgccgtctttttgacctatatgaccgttggtttgccgctgccggtgatcccgctctttgtccatcaggagctggggtttggcaacaccgtggttggcgtggcggtagggatccagttcctcgccaccgttctgacccgggggtacgccgggcgcctggcagaccagtacggcgccaaacgttccgtcctgcaggggatgctggcctgcgccctggcgggcgcggcatggctggccgctgcgctgctgccgctgccggtgctcgccaggctcggcctgctgctgctgggccgcttgatcctcgggtttggcgaaagccagctgctgaccggaaacctgagctgggggatgggcctggtgggtccggcccgttccggcaaagtgatgtcatggaacggcatggcgatgtacggctcgctggcggtgggcgccccgctgggattattgatctatagccattttggcgtggcggtgctggcctgtgtcaccatgggactaccgctcgtcgcctggcttattaacggtaccgtgcgcaaagtggcggcccacggaggcgagcggccttcactctggagcgtcatcggcatgatctggcgcccgggcattggcctgggcctgcagggtgtcggctttgcggtgatcggcaccttcgtctccctctatttcgccagccatagctggccaatggccggctttaccctgacggcgtttggtggcgcctttgtgctgatgcgagtgctgttcggctggatgccggatcggtttggcggcgttaaggtggcgatggtctcgctgctgatagaggcggttggtctgacgctgctgggactggcgccgaatgcctggctggcgctggccggtgcggcgctgaccgggtgcggctgttcgcttattttcccctcacttggcgtggaagtagtgaagcgcgtcccggcgcaggtgcgcggcaccgcgctcggcggctatgcggcctttcaggacatctcctatggcctgaccgggccgctgaccggcctgctggcgacctcgctgggctactcgtcggtgttccttgccggcgccctctgcgcggcgctggggatcctcgtcacccttatctcatttcgccgctaggttattgtccggcctgaaaacgctgtaggaaacaccgcggcgtttggcatgaaggggagccgtaaacgccgccggtggctgctgggctacagcaggagccacagcacaaggagcaggacaaccgcgcccagcgccagctgccacggcttagcgctccacgtccgcctggcgactggctcctcctgcgggatggccagcgtctcctgggcgcgggccacccgcagcacaaacaccttgttcagcagcgccaggatctgcgccgggctcagcgtggtctgcggcgtgacctgccagctgcgacgggcaaagtcgacaattttctgccactccgcggcctccagcggctgcttgagcgctccctgcagcgaggtgagcgtcggcgcgctttgcgcactcagcgtttgccgcgcctgcagccagtacgaaagcggcaggaagtgcgtcgccgggatcagctccccggacttgacgccgcaaagctccagcatggattgccaaatcagcttgcttggttcgccggtggcggccgccagcttagtcaccagctgattgagcgtattatgctcggctggcaacagcgggcgcagggtcggcgggcgctgctgcggctgcgggatcgacagctggccatgctgcagcagatgcagaatgttctccagctgcgtctggctaagggcatgcagcgccgtttgcccataatgctgacgaatataatcgctcaccgcctggcggttattgccctgaccgagcagatcgctgagctgcgctaaggtctggcgatgatgatgattatcctgagcggcggctaagcgctggttgagactggcctccgcggcgctgaaatggcaggccagcaggggcgagtcacctttcagtccgaggtcatgtttgacgcaggcccacacttccgcgttctgctgcgaggtcagcgccaccaggcgcgtgatcagtcgctccagaacggtgcgttgctgcatggaaagcgaaggttcgccggtggcggcagtgcctgatgggcctcgccctggaggacggtctggcatatcagcaagggggtgcgtcatgattcatcctttcgatatcgcggtgctggaaccaggtgatgagtatgcctggcggccagattatggcacacttccccagttaactctcgttctcagacaggtactgaactgtgaaaatcctcgttgatgaaaatatgccctatgcccgtgagctttttagccgtttaggcgacgtgcagacgatcccaggccgtccggtcccggccgatgccctgaccgatgcggatgccctaatggtgcgctcggtcacccgggtcaatgaagcattgctcgccggcaaggccattaagttcgtcggcaccgctaccgccggcaccgatcacgtcgatcaggcgtggctgcagcaggcggggattggtttctctgcggcgcccggctgtaacgccattgcggtggtagagtacgttttttcatcgctgctgatgctggctgaacgcgacggctttgcactgcgcgaccgcaccgtcgggatcgtcggcgtcggtaacgttggcgggcgactgcaaaagcgcctggaagcgttggggatcaaaactctgctctgcgacccaccgcgcgccgatcgcggcgacgaaggtgacttccgctccctcgaggcgctggtccaggaagccgatgtcatcaccttccatacgccgctgtataaagaagggcaatataaaaccctgcatctggcggatgaggcgctgataagccgcctgaagcctggaacgattttgatcaacgcctgccgcgggccggtggtcgataacgccgcactgctaaagcggctggaagctggtcagccgctgagtgtggtattggacgtctgggagccggagccggatctaaacgttgagcttctcaagcgagtggatatcggtaccgcgcatatcgccggctacaccctcgaagggaaagcgcgcgggacgacgcaggtttttgaagcctacagcgcctttatcggccatccgcagcaggtagcgctggacactctgctgccggcgccggaatttggccgcattaccctgcatggaccgctcgatcagccgacgctgaaaagactggtccacttggtgtatgatgtgcgccgcgatgatgcgccgctgcggaaggtggccggcgtcgccggtgaattcgacaagctgcgtaaaaattatcaggaacgtcgcgaatggtcttcgctgtatgtgcagtgcagcgatgagcaggcggcgacgctgttgcgccagctcggttttaacgccgtgcatcatcctgttcgttaatgtcttcttaatgcccctgccggatactccggcggggccgctttatttctggagttaaccaccatgtctgaaggctggaatattgccgtactgggcgcaacgggcgccgtaggcgaagccctgctcgaaactcttgctgaacgccagttcccggtaggagagatttttgctctggcgcgcaacgacagcgcgggcgaacatctgcgttttggtggcaagtcggtgatcgtcaaagacgccgccgaatttgactggacccaggcccagctggctttcttcgccgccggcgtcgaagccagtgcagcgtatgtcgaagaagcgaccaacgccgggtgtctggttatcgatctcagcggcctgtttgcgctggagccggacgtaccgctggtggtgccggacgtgaacccgttcgtattaggcgattaccgcaaccgcaacctgattgcggtgcctaatagcctgaccagtcagctgttgacggcgctcaaaccgctgatcgatcagggcgggttgtcgcgcattagcgtcactaacctgctctccgcctcggggcaggggaaaaaagcggtggatgcgctggcgggtcagagcgctaagctgctgaacggcattcctatcgatgaagacgatttctttggtcgccagctggcgttcaacatgctgccgctgctgccggatcgtgaaggtagcgtgcgcgaagagcgccggatcgtcgatgaagcgcgcaaaattctccaggatgacgggctgatgatctccgccagcgtcgttcagtcgccggtcttctacggccatgcgcagatggtgagcttcgaagcgatgcgcccgctggcggcggaggaggcgcgcgacgcttttacccgcggcgaggatatcgaactttctgaagagggcgaattcccgactcaggttggtgatgcctccggcaatgcccgcctctccatcggctgcgtgcataacgattacggtatgccggagcagatccagttctggtcggtagcggataacgtgcgcttcggcggcgcgctgatggcggtgaagatcgccgagaagctgattgaggagtacctgtactgatgtctgagatggagcaacagccgatctgtaaaatcgcgctgggcatcgagtacgacggcagcaaatattacggctggcagcggcaaaacgaagtgcgcagcgtgcaggagaagctggaaaaggcgctctcgcaggtggcgaacgaaccgattaccgtcttttgcgccggccgcaccgacgccggcgtccatggcaccggccaggtggtgcatttcgaaacccgggcgcagcggaaagatgccgcctggacgctgggggtaaatgcgaatttacctggtgacatcgcggtgcgttgggtcaaacatgtaccggcggattttcacgcccggttcagcgccacggcgcgccgctatcgctacgtcatctataatcatcgcctgcgtccggcggtgttaagtcatggcgtgacgcattttcaccagccgctcgacgccgagcgtatgcagcgcgccgcgcagtgtctgctgggagagaatgactttacctcgtttcgcgcggtacagtgccagtcgcgtaccccgtggcgcaacgtgatgcatattaacgttacccgctacggcgcgtatgtggtggtggatatcaaagcgaatgcctttgtacatcatatggtcaggaatattgtaggcagcctgatggaggtcggggccggaaaccagccggagagctggatggcagaactgctggcagcaaaagacaggacgctcgctgcggcaacggcaaaagcggaagggttgtatctggtgtcggtggattacccggcccactatgatttaccggtgctgccaatgggcccgctgtttctggcggactaatagggtcattaagggtaaagacaaacatggacttgattcactttttaattgatttcatcctgcatattgatgtgcaccttgccgaactggttgcccagtatggcgtctgggtttatgccattctgtttttgattctgttctgcgaaaccgggctggtggtgacgccattcctgccgggcgattccctgctgttcgtcgcgggcgcgctctcggccttgccaaccaacgatctcaatgtccacctgatggtactgctgatggtcatcgcggccatcgtcggcgatgcggtcaactacaccattggccggctgttcggcgaaaagctgttcagcaatccgaactcaaagatattccgtcgcagctatctggataaaacccacagcttttacgaacgtcacggcgggaaaaccattatcctggcgcgctttgtgccgatagtccgaaccttcgcgccgtttgtggcgggaatggggcatatgtcctatcgtcattttgcagcctataacgtggttggggcgctgctgtgggtgctgctgttcacctatgccggctatctgtttggcgatttgccggtggtgcaggagaatctgaagctgctgatcgtggcgatcatcgtcctctccgtcctgccgggtgtgattgagatcatccgccataagcgggcggcgtcaaagcaggcgaagtagtttagcctgtgttgcgcgtgacggtgcagagcgtcacgcgcagcggtttgaccacttttttatcccatgttccgggatgatatgatttaatgtgcaacattcatggtctgtaagaggcaaaaatggcattatgcgccccttacgacaaaactggcatcgaccaggttcaggcagaaaggttatcaatgagctggattgaacgaattaaaagcaacatcactcccacccgcaaggcgagcattcctgagggtgtatggaccaagtgcgacagctgcagtcaggtactctaccgcgccgagctggagcgcaacctggaggtttgtcctaagtgcgatcaccatatgcgcatgtcggcgcgtaatcgcctgcatagcctgttggatgaaggttctctggtagaactgggtagcgaacttgagccaaaagatgtgctgaagttccgcgattcaaaaaaatacaaagaccgcctggcgtccgctcagaaagagacgggcgagaaagacgcgctggtggtaatgaaaggtacgctctacgcgatgccggtggttgccgccgcctttgagttctcctttatggggggctcgatgggttccgtcgtcggcgcacgctttgtgcgcgcggtggagcaggcgctggaagataactgcccgctgatctgcttttccgcctccggtggcgcccgtatgcaggaagcgctgatgtcgctgatgcagatggcgaaaacctccgcggcgctggcgaaaatgcaggagcgcggactgccgtacatctccgtgctgaccgacccgaccatgggcggcgtatcggcgagctttgcgatgctgggcgatctgaacattgccgagccgaaagcgctgatcggctttgccggtcctcgcgttatcgagcagaccgtacgcgagaagctgccgccgggattccagcgcagtgagttcctgattgaaaaaggggcgatcgatatgatcgttcgccgtccggaaatgcgtctcaagctggccagcattctggcgaagctgatgaacctgccggcgccggttgccgtttcggaagcgcctcatgaaggcgtggtggtgccgccggcaccggatcaggaacctgaggcctgataaagcagagggcagggcctggcggcgctgcccttttttattcatacgcgttaaccgtcaattcttacgggcatcatggaaaaagatcctattcctcaggccacgtcgcccctggctacgtggctttcttatctggaacatctgcacagtaaaaccatcgaccttgggctggcgcgcgtcagcgaggtcgccgggcagatggatatcgttaaaccggcgccgttcgtttttaccgtcgcgggcaccaatggcaaaggcaccacctgccgcacgctggaaaccatcctgatggcggccggttataaagtgggggtctacagctctccgcatctggtgcgctacaccgaacgcgtgcgcattcagggggctgaactgccggaggcggcgcatacggcttcgtttgctgaaatcgaagcggcgcggggtgacatctcgctgacctattttgaatacggcacgctctcggcgctgtggctgtttaagcaggcgcagctggatgtggtgatccttgaggtcgggctcggcgggcgtctcgacgccaccaacatcgtggatgccgacgtcgcggtggtcaccagcatcgccctcgatcataccgactggctggggccggatcgcgaaagtatcggccgggaaaaagcgggcatctttcgcgccggtaaaccggcggtggtgggggagccggatatgccgctcaccatcgcggaagtggctagcgagaagggcgcgctgctccagcgccgcggcgtcgactggcgctatgaggtggaaggcgaaacgtggtccttccgcgatacggcaggggcgataagccacctgcctctgcctcaggtgccgttgccgaatgcggcgacggccgtggcggcgctgcgcgccagcgggcttgccgtggatgacgctatcctgcgcgcagggatccgcgatgcgatgctcccaggacgctttcagataatcagcgatgccccgcgagtgatcctcgatgtggcgcacaacccgcacgcggcggcctatctcgccgggcgtctcaaaacgttagcgaaaacgggacgcgtgctggcggttattggtatgctgcatgataaggatatcgccggcacgttggccaatttggccccggaagtcgatgcctggtactgcgcgccgctggaaggcccgcgcggcgcgacggcggagcagctggtggaacatttgcgctgcggtacagtctatagcagcgtggcgcaggcgtggcgtgcggccatggctgacgctaaagtggaagataccgtgctggtgtgtggttcgtttcacaccgtagcgcaggttatggaagagatagacgcggggagaatcggtggcgagtaagtttcagaaccgtttagtcgggacaatcgtgctggtggcgctgggggtgattatcctgccagggctgctggacgggcagaaaaagcattaccaggatgagtttgccgcgatcccgctggtaccgaaaccaggcgatcgcgatgaaccggatatgttgccggcggcaacccaggcgttgccttcgcaaccgccggaaggggcggcggaagaggtgcgggcgggcgatgccgccgcgccatcgttagatccatcgcgtattccggtgaacagcaacagcttcgatgacgttcaggagccggtggtggccgcgaaaccgcagcccaagccgcagccgaaaccgcagccgcaacagcaggcctcgacgccaacgccgccgccggctaagccacagcagcaacagccaccgcagcagcaggcggccctgccggcgccgaccggcaaagcctatgtggttcagctgggcgcgttgaagaacgccgataaggtgaatgagattgtcggtaaactgcgggcctcgggtttcaaagtctatacgtcgccttcgacgccggtacagggtaaaattacccgtatcctcgtcggcccggatgcgtcaaaagacaagctgaaaggccagctgggcgatctgcagcagatctccgggcttagcggggtggtgatgggcttcaccccgaactgattgttttttccgccatgcggagagaacgtggcggggagaaacgccccgcaaaccctgtctcagccgccctgaagaggcgaaaggcagtctggcgttgaatgttttttcagcgccatttttatttctgtagggcatggaaatccctacgcaaacgttttctttttctgttagaatgcgccccgaactggacgacagggcgtaaatcgtgggacgtatatggtctggattgattacgccattatggcggtgctgggtctttcttgcctggtcagcctgatccgcggctttgttcgcgaagctttatcgttagtcacgtggggttgcgcgttttatgtcgccagccattactacgctgacctgtctgtctggtttacgggctttgaggatgaacgggttcgaaatgggattgctattgcggcgctgtttatcgtgacgctcatcgttggcgctatcgtgaactatgtgataggccagctggtggagaagaccggtttgtcaggaaccgacagggtattggggatctgcttcggcgcgctacgtggggtgctgatcatcgccgctatcctgttcttcctggacacctttaccgggatggcgaagagcgatgactggcatcagtcgcagtttattccctattttacccccgtcatcagatggttttttgaatacctgcaaagctcgtcaagtttcttgcctaaagtatagactttgggtcgttgctgaacgaggaaaagacgtatgtgcggtattgtcggtatcgccggtgttatgccggttaaccagtcgatttatgatgcgctaacggtgctccagcaccgtggacaggatgccgctggcatcatcaccattgatgccaacaactgcttccggttgcgtaaggctaacgggctggtaagcgacgtattcgaggcccgccacatgcagcgtatgcagggcaatatgggtattggccacgtgcgttatcctacggcgggcagctccagcgcctccgaggcgcagccgttttacgttaactcgccgtatggcatcacattggcgcataacggcaacctgaccaatgcgcacgagctgcgtaaaaagctgtttgaagaaaaacgccgccatatcaataccacctctgattccgaaatcctcctcaatattttcgccagtgagctggataacttccgtcactacccgctggaagcggacaacatcttcgcggcgattgcggcgaccaaccgcctgattcgcggcgcgtacgcgtgcgtggcgatgatcatcgggcatggcatggtggccttccgcgaccctaacggcattcgtccgctggtgctgggtaaacgtgacgttggcgacggtcgcaccgagtatatggtggcctcggagagcgtggcccttgatacgcttggttttgaattcctgcgcgatgtggcgccgggcgaagcggtctatattaccgagaaaggccagctctatacccgtcagtgtgccgataatccggtcagcaacccgtgcctgttcgagtacgtctattttgcccgtccggactcgtttattgacaaaatttccgtctacagcgcccgcgtcaacatggggactaagctgggcgaaaagattgcccgcgagtgggaagatctggatattgacgtcgttattccgatcccggagacctcctgcgacatcgcgctggaaatcgcccgcattctcgacaaaccttatcgtcagggcttcgtgaagaaccgctacgtcggccggacgtttatcatgcccggtcagcagctgcgtcgtaaatctgttcgccgtaagctcaacgccaaccgtgcggaattccgcgataagaacgtgctgctggtcgatgattccattgtacgcggcaccacctcggagcagatcattgagatggcgcgtgaagcaggggcgaaaaaagtgtatctcgcctccgctgcgccggaaattcgtttcccgaacgtgtacggtatcgatatgccgaccgccaacgaactgatcgcccatggccgcgaagtggatgagatccgccagatcattggcgccgacggcctgattttccaggatctcaacgatctgatcgacgcggtgcgcgcggagaacccggatattcagcagtttgaatgctcggtgttcaacggcgtatatgtgacccgggatgtcgaccagcagtacctcgactatcttgactccctgcgtaacgatgatgccaaagcggtccagttgcagaacgaagtcgaaaacctcgagatgcacaacgagggttaagccgttcacgcgtcgcgggcctgccgtaccgaaaggacggcgggctttttttcgcccctcaactgtgcgtcaatagttgcgccagaggctataatccggcaaagtctgcggcacacgcgcaaggggtaacagaacgtgaaacgactgattattggcatttccggcgccagcggcgccatttacggcgtgcggatgctgcaggtgctaagagatgtgccggatattgaaactcatctcatcctcagccaggcggcgcgccagacgttggccatggagaccgactactccgtacgtgaggtgcaggcgctagccgatgtggtgcatgacgcccgcgatatcgccgccagtatctcttccggttcgtttaaaaccgccgggatggtgattttaccctgctcaatgaagacgctctcgggcattgtccatagctatacggatggcctgctgacccgggcggcggatgtcgtgctgaaagagcgtcgtccgctggtgctctgcgtgcgggaaactccgttccatttgggccatctgcgtctgctggttcaggctgcagagctgggggcggtgataatgccgccggtaccggctttttaccaccggccacaaagcctggacgatgtcatcaaccagaccgtcaatcgggtactcgatcaatttgatattaatctggagcacgacttgtttacccgctggcagggggcctagcgtcgcactatagtggtgcatgaaatgtacgcttgcgctccggtggtgcaaatttgttgccgcgatcaaatcctcgacatttatttcgtctttttgcgctcaggcgctgcggtttcgccagtaatgctggtatcttcccttttaagacaatcctgcaactttattttaacaaatttaaccctgttcccggcacgcaccgggaagatggcacaaaaactgcaggattgatcggcaatcaccataacaagcaacgcaccacatcacgacacgacacttaagggtactgtatgaagaagacgattctggctctctctttactcgtgggaatgagcagcacggccagcgtgtttgctgctctgccgcagagcattcgcattggcactgacgcgacctatgcgccattttcgtcgaaagacgcgaaaggggactttgttggttttgatatcgatttaggcaatgagttgtgctcccgaattaaggtgaaatgtacctgggtcggcagtgattttgactccctgatcccctccctcaaagcgaagaaaatcgacgccatcatctcttccctctctattaccgagaagcgccagcaagagatcgccttctctgacaagctatatgccgctgactcgcgtctgatcgccgccaaagggtcgccgatccagccgacgctggaggcgctgaaaggcaagcacgtcggcgtgctgcagggttctactcaggaagcctatgctaacgaccgctggcgcagccagggcgttgacgtggtggcttaccagaaccaggatctgatctattcagacctcgcagctggccgtctggatgcggcgctgcaggatgaagtcgccgccagcgaaggcttcctgaaacagcctgccgggaaagatttcgccttcgccggcccgtccgttaaagacaaaaagtactttggcgacggcaccggtatcggcctgcgtaaggacgacgccgagctgaaagccgcgtttgataaagcgctgggcgagatgcgtaaagacggcacctacgacaaaatggcgaagaaatacttcgattttaacgtgtacggcgactaagactgctgcaggcccgcacaatggggtgggcctgccgccaggttcgtatccatgccccaaaagggtgcatctaaacgcgctgtggatcatttcagtgcaaaagcagccagttttttggctaaaaaatgcatagttaagcgtttctgatgcaaaaaatcggcctttctggtgcataaatctttgcccttaaggggcgaataatggcacgataactggcgtaaatagttctaataaacccgttagaatgacagtctgtcgaggatagttatgaaaaaactggcgttgtctctctctttagcgctggccctttccagcgtttccacggtctttgcagccatcccgcaaaaaattcgtatcggtaccgatccgacttatgctcccttcgaatcgaagaatgcgcagggagaattggtcggttttgatatcgatctggcaaaagagctgtgtaagcgtattaatacgcaatgtacctttgttgaaaacccgctggatgcgctgatcccctccttaaaagcgaagaaaatcgacgcgattatgtcttcgctgtcgattactgaaaagcgccagcaggaaattgccttcactgacaagctgtatgcggcagattcgcgtctggtggtgaaaaagggcagcccggtaacgccggatctcgccaccctcaagggtaagcgcgtgggcgtgctgcaggggacgactcaggaaacctatggcaatgagcactgggcgccgaaaggtatcgaaattgtctcctatcaggggcaggacaatatctattccgacctgaccgccggccggatcgacgccgcgttccaggatgaggtcgcggccagcgaagggttcctgaaacagcctattggtaaagattaccagtttggtggcccgtcaatcaaagacgagaaactgtttggtgttggcaccggtatggggctgcgtaaggaagacaacgaactgcgtgaagcgctgaacaaggcgtttgcagagatgcgtaaggacggcacctacgacaagctggcgaaaaaatatttcgattttaacgtatacggcgaataattctcacgcctcgccattgcgtgcgtttcgcgcgcaatggtgaatgacagacagggtaggcagcatgctgtatgggttttcacaggttattttgcagggtgcgctcgtcaccctggagcttgcgctcagctcggtcgttctcgccgtcctgattgggctggcgggcgctggcgcaaagttatcgagcaaccgtccactggcgctggtatttgaaggctataccactctgatccgcggcgtgcccgatctggtgctgatgctgctgattttctacggcctgcagattgcgctaaacagcgttaccgatgcgctgggcatggcccagtttgatatcgatccgatgatcgccgggattattaccctcggctttatctatggcgcctattttacggaaaccttccgcggcgcctaccttgcggtgccgaaggggcatatcgaagcggccaccgcctttggctttagcggcgggcagacgttccggcgtattctcttcccggcgatgatgcgctacgcgctgccggggataggcaacaactggcaggttatcctcaaggcgacggcgctggtctcgttgctggggctggaggatgtggtcaaagccacgcagctggccgggaaaagcacctggcagccgttctacttcgccatcgtctgcggcctgatttatctggtgtttaccaccgtttctaatggcgtactgctgctgctcgaacgccgctataccgttggcgtgaagagggctgacctgtgattgaaattattcaggagtactggaaatcactactgtggaccgacggctatcgctttaccggtgtggcgattaccttatggttgctgatctcttcagtggtaatggggggcatcctggcggtgtttctggccatcggccgcgtctcgagcaataagtttatccagttccccatctggctgttcacttacatatttcgcggcacgcctttgtatgtgcagctgctggttttttactccggcatgtataccctggaaatcgtcaaaggcacggagctgttgaacgcttttttccgcagcgggctaaactgcacggtactggcgttaaccctgaatacttgcgcctataccactgaaattttcgccggcgcgatccgctcagtacccgccggagaaattgaagcagcccgggcctacggcttctcttcggtcaaactgtatcgctgcattattctgccttccgcgctgcggattgcgctaccggcctacagtaacgaagtgatcctcatgctgcactctaccgcgctggcgtttaccgctacggtaccggatctgctgaaaatcgcccgcgatatcaactcggccacctatcagccgttcaccgcgtttggcatcgccgcggtgctctatttaattatctcgtatgtgctgattagcttgttccgtaaagcggaaaagcgctggttgcagcatatcaaaccttcttcgacgcattgagaacgccatgtccgacaataaattaaacgttatcgatctgcataaacgctatggggaacacgaggtgctgaagggcgtctcgctgcaggcgaaagccggggacgttatcagcatcatcggttcatcgggttccggaaaaagtacctttttgcgctgtattaacttccttgaaaaaccgagcgaaggcacgatcgtcgtcagcggccaaaatattggtctggtacgggataaagacggccagctgaaggtggccgacaagaaccagttgcgcctgctgcgcacccggttgaccatggtgtttcagcatttcaatctgtggagccacatgacggtgctggagaacgtcatggaagcgccgattcaggtgctgggcttaagcaaacaggaagcgcgcgaacgggcggtaaaatatctggccaaggtcgggatagacgaacgtcagcaggcgaagtatccggtgcatctttccggtggccagcagcagcgtgtctctattgcccgcgcgctggcgatggaaccggaagtgctgctgtttgatgagccgacctccgcgctggatccggaactggtgggcgaagtgttacgcattatgcagcagctggcggaagagggaaaaaccatggtggtggtgacccatgaaatgggctttgcccgccacgtctcttcacatgtcatttttctgcatcagggtaaaattgaagaagaagggcatccggatgcgctgtttggcgcgccgaaaagcccgcgcctgcagcagtttttgaaaggttcgctgaaataatcggctcatccggcgtctgtggacgccggatgagcttcccgctccagccgatagatccagtcatcgtaatcgacgccgttcagatgataggctttctccagcacctgggtgcgcacaaagccttgcttctccagcaggcgcgatgagccacggttttcacccagcacccaggcattgatggcctgcacccccagggtggtgaaaccatactcgcagaccgcccgcagcgcttcgctggcatagccttttccctgagcctgaggcagcagcgcgtagccgacgtcagcttcgtgcggatttttcggactgatgcggagcccaatatcgcccagcgcctcgccgaatttatcgcgcaatacaaacaccccgggatcggcacagcgactgacgaagacgctgcgcagcgcctcctcgcttaacacctcccccataaaacgcatcacctgcggatcctggcgcaggcgcagaaaaaagggccagtcatcggtaacaaagcgggtaagcgaaaggcgtggtgtggtgatggtcgtcataaagcagtcaatacgcagaaagaaaagcctaccttagcactttgcttcgccaggtaacaccggcgaaccggccggctggcggtgaattcaggcgattaagggtgctggttgtcctgaatatggcgatgctgcagcgccgggtgaggccatccaggcgtggagcatgagccagcagaatggaatcaggggagccaatgctcccctgtgtcagccattaactcagcacatcctttagcgcttcgtccagatcgtaccagcggaaggcgaagccggcggcctccagacgctttggcagcgcgcgctggccgccgagcaccaggacggcggattcccccatcaacaggcggatagcggcggcgggaacgcggaaaatcgccggtcgatggagcgcatgacccagcgcatgggcgaactgctcgttatgcaccgggtagggagaaaccatattgaacggaccgcgcagatcgttatccagcagccacagaatgccgttaaccatatcgtcgatatggatccaggccaggtactgtctgccgttgccgataggcccgccgaggccgagcttaaaggcgggtgtcattttgccgagaataccgccccgcggagccagtaccacgccggtgcgcagcaggcagacgcgggtgcgctcgctttgcgcttcgcaggcaatttgctcccagcgggcgcacagcttatgggtaaactcattgtgcggtggctcttcttcggtcaccaccacctcgccgaggtcgccatagtagccgatggcagacccgctgatcagcacggagggaggggtgtcgctggcgtggatcaggcccaccagccgctgcgtgagatcccagcggctatggcacaagcgttgtttctgctcggccgtccagcgtttatcagcgatgggttcacccgccagattgatgacggcatcaatgtcattgaggtggtgatggccctcgaaatcgcgccacagggtgacgcgcggatcgagacgggcgcgggcggtatccggatgtcgcgtggagaccgtgacgctatgcccgagctccagcaatctgggtatcagatgtcggccaatcaggccggtaccaccagtaagcaggatcttcataccacctccctgacatggttagcgacgccagctcatggtcatggacaccgagtcggcatagcgcagcgcatgaagtttatcaatctccacttcagcatatgtgacccagtgatgttcgcatgcgatattcagcacatcctgagttaatttttccagcagcgagaaacggccattctcaagatggctgattatacgcttggtaatggtgcggtagttcagcgcatcattgatgtcctcgctgtcgcgcgctttatcggcagggtagtgaatagctacattcactaccacgtcctggcggttggcgatctcttcctctttaataccaataaaagtccgcaggcgcaggttcttaatacgaataatggcgtctggttgagacattgcaggcttcctccgtggtgtaagtcctgcaatcatacaacaaagcgcgacgggcgagcagggggttaataaagctgaatttttaacatcgcttccgccgttgccggccgctgcttaatgcgctcataccagttgtgcaccgccggatagttcgccagatcgatacgctgtcggacatggcagttcacccagggccaggcggcgatgtcggcgatactgtagtggtcgccgccaagccacgggctgcatcccaggcgctgatttagcaccccatacagtcgttgggtttccacctgaaaacgttcaatagcgtagggcacggtttgcggcgcggtgtgggaaaaatgttgattttgccccagcatcggccccagcccgccgacctgccagaacagccactgcagcgtgacgtagcgttcccgcagctcgccgctcagcagcttaccgcttttttccgccagatagagcaggatggcgcctgactcgaaaacgctcaacggcgccccgccgtcagcaggcatgtggtcgacgatagccggaactttattattcggcgaaatcgccagaaactgcggatgaaattgttcccctttgccgatatcgacccgaattagccgataggctagctccgcctcttcgaggaacagggtgattttgtggccgtttggggtgggtgcatagtaaagatcgatcataatatttcccgccgtcgtgggtcgcaaactgttcgagtataggtgaagctgcgccacccgggagaaattccgcaagcgacccggcagccaggcgacgtgtcgtccgcgctcgagcagtgacatcgcctgtaagacaggctatgttggcttattgtcctgtctaccacccttgaggaagctatgagccagcctgtcattaccctgtggtccgatgccgattttttctcaccgtacgtgatgtctgtctatgtcgctctgcaggaaaaaagcctgccttttacccttaaaaccgtcgacctgaaccgcggcgaacatctgcaggcgggctggacaggctatgccgccacccgtcgcgtaccgctgctggaggttgatgatttcgcgctaagtgagtcttcggcgattaccgagtatctggatgagcgtttcgcgccgccggagtgggagcgcatctacccgcatgatctgcaaaaacgagcccgcgcccggcagatccaggcctggctgcgcagcgatctgatgccaattcgtgaagagcgatccaccgccgtggtgtttgacggggcgaaaatgccggacctcagcgaggccggcaggcaatctgcggaaaagctgtttgccaccgccaccacgctactggcccacggcgggcaaaatttatttggcgaatggtctattgccgacgcagacctggcgctgatgctcaatcgcctggttctcaatggcgataaggtaccggaggcgctggctgattatgcgtctttccagtggcagcgggcctcaatccagcgttacgtggcgctttccgccaaacgctgaggctgataacccgccgcgcttccgctatcatagaggcatcgtaaccagtggagatggaacctatgaagctgatgtttgcctccgatattcatggttcgctgcccgccacggaacgcgtgcttgaacggttcgcgcaaagcggcgccaggtggctgatcatactcggcgatgtgctcaatcacggtccgcgcaacgcgctgcctgaggggtatgcgccgggtgaggtggcggagcggttgaacagcgtggcggaacgcattgttgccgttcgcggcaactgcgacagcgaagtggatcagatgctgcttcgttttccaatcaccgcgccctggcagcaggtgcttagcgaacgctatcgcctgtttctgacccacgggcatctctatagtccggataatctgccgccgctggccgctggcgatgtcctggcatatggccatactcatataccggtcgcggaaaaacgcggcgcaatttacctctttaatcccggctcagtgagtatcccgaaagggggatattccgccagctatgggctgctggatcaggggcggctgcaggttttagcactcaatgataatcaggttattgcagaggttgcaatttacccgtaatttagccctcaatcataaagacgcgccgcgagagcgcatttaaagtaaggtttcctgatggcggaacagaatcatttggcaagcacagaatgggtcgatattgttaatgaaaacaatgaggtgatagcacagtccagccgcgagcaaatgcgcgcgcagtgcctgcgccaccgggcgacctatatcgtcgttcatgacggaatggggaaaattctggtgcagcgacgcaccgagacaaaagactttcatccgggcatgctggatgccaccgctggcggcgtcgtgcaggctgatgagcagctgctggaatcggcccgtcgcgaggcggaagaggagttaggcatcgccggggtgccgtttgccgatcacggccagttttattacgaagacaaattctgccgcgtctggggaagcctgttcagctgcgtctcccacgggccgttcgccctgcaggaagaagaggtcagcgaggtgtgctggttaacgccggaagagatcaccgcccgctgcgatgagttcacgccggactccctgaaagcgctggcgctgtggatgacccgcaacgccggtaatgagtatgatgatgcggaagagagcgagcgcgaataaagatcgcaaacgcgcggcagcaatcgtcgctcgcctcctgacgacaaaaaggcagccattcggctgccttttgctttgaccacagcggcagattacttctgctgctgagccgattggatcgcggtcagtgcgatggtatagacgatatcgtctaccagcgcgccacgggacaggtcgttgaccggcttgcgcataccctgcagcatcggcccgatggagatcaggtcggcagagcgctgtaccgctttgtacgtggtgttaccggtgttcagatccgggaagatgaacacggtcgcgcggccagctaccggtgagttcggcgctttggacttcgctacgtcagccatcaccgcggcgtcatactgcagcgggccgtcgatcatcaggtcaggacgtttttcctgcgccagacgggtcgcttcgcggactttctcgacatcgctacccgcgccggaggtaccggtggagtaggagagcatcgccacgcgcggttcgatgccgaaggcaatcgcggattcagcggactgaatagcgatttccgccagctgctcggcggtcgggtccgggttgatcgcacagtcgccgtaaacgtaaacctgttccggcagcaacatgaagaacacggaggagaccagcgagctgcccggcgcggttttgatcagctgcagcggcggacgaatggtgttggcagtggtgtgaaccgcgccggataccagaccgtcgacttcgtcctgttccagcatcagggtgccgagaaccacgttgtcttccagttgctcacgcgcgaccgcttcggtcatgcctttgttcttacgcagttcgaccaggcgacccacatagctttcgcgaaccacttccggatcgacgatttcaatgccggcgccaagctcaacgccttgggccgcggctacgcggttgatctcatccgggttacccagcaggacgcaggtggcgatcccgcgttcggcgcaaatcgccgccgctttcacggtacgcggttcgtcgccttccggcagaacgacacgtttgccggctttgcgcgccagctcggtcagctggtagcggaaggctggcggagagagacggcggctgcgctcggaggtcgcggtcagcgattcgatccagtcggcgttgatgtagttggccacgtattcctgaactttctcgatacgctcgtgatcgtcaaccggtacttcgaggttaaagctctgcaggctcagggaggtctgccaggtgttggtgttgaccataaataccggcaggccggtcgcgaaagcgcgttcacacagcttgctgatgcgtgcgtccatttcatagccgccggtcagcagaatggcgccgatttccacgccgttcattgccgccaggcaggccgcaaccagcacgtcaggacggtctgcggaggtaaccagcagagaaccagggcggaagtgttccagcatgtgcgggatgctgcgcgcgcagaaagtcacggatttcacgcggcgggtattgatatcgccttcgttaatgatggtcgcattcagatggtgagccatgtcgatcgcgcgggtcgcgatcagatcgaagctccatggcactgcgcccagcaccggcagcgtactgcctttctgcagctgagccgggtcaatcttcacgatttttgctttcgacgagtcgtcgaaaatttccgacaggtcaggacgggtacggccctgatcgtcgacaggggcattcagtttgttgacgataacgccggtgatgctggtatttttggcgccgccaaagctgttacgggtcagttcgatacgctcgttcagctgttctggcgtgtcggtgccctgagacatcacgaagacgatttcagcgttcagcgttttggcgatttcaaagttcagcgcctgggcgaactgatgcttacgggtcggtaccaggccttccaccagcaccacttccgcgtcctgagtattcgcgtggtagttggcaatgatctcttccatcagcacatctttctgattgctggagagcagagactcaacatggctcatcttcagcggttcagcggcggtggtggtggaggagctggcgcgaacgatggtggtggtctggtctggggcatcgccaccggaacgcggctgggcgataggtttaaagacgctcagacgaacgcctttgcgttccatagcgcggatcacaccgaggctgacgctggtcagacctacgctggtaccgggaggaattaacatgatagtacgggacacggtatatcctctttcgttaccgccagtatcaggcgggatacaaaacagcaccgccagctatccgtcatatttcaagttgcacgtgcgttggctctacttgctcaccccggtggcgtacgcgctgtacgcggccggggttttgctgtgtcgccgccttcctgcagctcgaattattgcgggtcagggctggcgatgtggaattatgcggtcagacggctggcgtcttgcgcgatgaccagctcttcgttggtcgggataaccacggcaggacgggtgccttctttgttgatgaagccagacttgccgaagcgggcagcaaggttacgctcatggtcaacttcaaagcccagtacgcccagtttgcccagcgacagctcacgcaccatcgcggcgttttcaccgataccaccggtgaaaataacggcgtcaagacggccgtccatcagcgcggtgtaggaaccgatgtatttcgccaggcggtggcagtaaacgtccatcgcgcgtttagcgtcggctttttcctgatagttgtcttccacgtagcggcagtcgctggtgacttcggtcagacccagcaggccggactctttggtcagcattttgttgatcgcgtcaacgctcatgcccagggtgtcgtgcagatggaagatgatggccggatcgatgtcaccggagcgggtacccatcaccaggccttccagcggggtcagacccatggaggtgtcaacgcatttaccattacggatagcggaaacagaaccaccgttgccgaggtggcaggtgatgatgttcagctcttccaccggcttgttgaggatcttagcggcttcctgagtcacgtagaagtggctggtgccgtgcgcgccgtaacgacgaacgccgtgctctttgtacaggctgtacggcagggcgtagagataggattcttccggcatggtctgatggaacgccgtatcgaatacagccacgtttttgtctttcaggtgcgggaaggattttagcgcttcagcgatgccgatcaggtgtgccgggttgtgcagcggtgcgaaagacgcggcgtctttaataccctgaattacggactcgtcgatcaccacggagctggtgtatttttcaccgccgtgtacgatacggtggccgattgcggtcagctgagcagacagttctggtttttgtgccagaatagtgttaacgataaagttcagcgcttcactgtgcgcggcgcccgcgcctaactcggcttcttgtttgctgccgtccattttccatttgatacgggcttccggcaggtggaagcattccgctaaaccggacagatattcgtcgccgttcacggcgtcaaggatagcaaatttcagagaggagctaccgcagttcagaaccagtactaacttactcgacatggaagtacctttttatgatacgtggctaaaaaaacgtcagtgtgtcattagcgtagcgcaggatgacctcgacatttatgattaacatcatgccttgttctgttttcgggcacgatgagagaagtacatttgattttatgccattttgcataattttcagccaatggcagaatatgcgataatttgactagcctggcaaagagtctaaccgccctttcaggcgggcacaggatacctgattgcggcatcctttgccaaaatcttttgaacgatgtcatgcatagttggtgttttgcacgaattttttaagttttatatgtaaagttgaggtaaagccatgtcgacccctgagaaacgccccgttagcttctttagcttgttcaaccgcgggcagcattacgcaaagacctggcctctcgacaagcgcctcgcgccggtgtttattgaaaaccgcattattcgtgccacccgctatgccatccgcatcatgccgccaatcgccatttttaccctctgctggcagatagctcttggcggccagctgggccccgccgtcgctaccgcgctgtttgcgctgagcctgccgatgcagggactctggtggttgggtaagcgttcggtgacgccgctgccgccttccattcttaactggttctatgaagtgcgcggcaaactgcaggaggcggggcaggcgctggcaccggtcgaaggcaagcccgattatcaggcgctggctgacacgcttaagcgcgccttcaaacaactggataaaactttccttgatgatttgtaattcactacggaaaacgcatataaaagaaggcgcatgatttatgcgccttctttatttcacgccctaccgtgctacaggagtcacaacatggaaatgaccaatgcgcagcgtctgattttatccaatcagtacaaaatgatgacgatgctcgacccggataatgcggaacgctaccgtcgtctgcaaaccatcatagagcgtgggtatgggctacagatgcgtgaactggaccgcgagttcggccagctgacggaagaaacctgccgtaccgttattgatatcatggagatgtaccacgcgctgcacgtctcctggaccaacctgaaagacgcggcgggtatcgatgaacgccgggtcaccttcctcggatttgatgccgccaccgaagcgcgttatctcggctatgtgcgttttatggtcaacgttgaaggccgctacagccattttgacgccggtacccatggctttaactcgcagaccccgatgtgggagaaatatcagcggatgctgagcgtctggcacgcttgcccgcgccagtatcatctgagcagtaatgaaattaatcaaattatcaacgcctgagggaggtgcccgtgcagtgtaaaggtttcctgttcgatttagacgggacgctggtggattccttgccggtggtagagcgttcatggtgcaagtggggcgatcgtttcgccattgaccatgatgaaattctcagttttattcacggcaagcaggccattacctccattcgccattttatgccggggcgcagcgaggaggatatccaggccgaatttcgctacctcgagcagatagaagccactgatattgagggtatcgtcgcgctgccgggggcattagccctgctgaatacgctcaatgaggccgggatcccgtgggcgattgtcacctccggctcgattccggttgcccacgcgcgtcatcgcgcggcgggcctgccgatgcctgaggtgttcgtcaccgccgagcaggtgaaacacggcaaaccggcgccggacgcctatttgctgggcgccgagcggctgggtctgcctgccggggagtgcgcggtggtggaagatgcgccggcggggctcctctccggactggcggccggctgtcgcactatcgcggtcaacgtgcccgccgatgcccctcgcctggatgaagccgacctcgtgctgagcagcctggaagatctggtggttgaacgccagactgacggcgtggtaaatgtgcgtcttaaagcgtaaacccatgatttcgccccgcgtcgtcggggcttttttatgccactatgtcgactcccacttgtgacaaggaaacgttgtgaacggtgaattgatttgggttttatccctcctggccatcgcggttgtgctgtttgctaccggcaaggtgcgcatggatgctatcgccctgatggtcattgtcgcctttgtcctcagcggaacgctgacgttaaatgaagctttttccggattcagcgatcctaacgtgatcctgattgccgccctgtttattatcggcgatggcctggtgcgcaccggagtcgccaccaaaatgggggcatggctggtgagcgtggcggggaacagcgaaaccaagatgctgatctacctgatgctcaccgtcgccggtctgggcgcgtttatgagctccaccggggtggtcgccattttcatcccggtggtacttagcgtctcggcgcggatgaatacctcgccatcgcggctgatgatgccgctgagcttcgccgggcttatcagcgggatgatgaccctggtggcgacgccgcccaacctggtggtcaacagtgaattgctgcgcgagggactgcacggcttcagctttttcagcgtcacgccgattggcctggtggtgctgatcctgggcatcgtctatatgctggcggtgcgctttatgctgaagacggataatggcgactccgcacgcgatgggcgaaaaagaagcaccttccgcgatttgatccgcgaatatcacctcaccggccgcgctcgccggctggccatccgcccgggttcgccgatgatcggtcagcggctggatgatttaaagctgcgtgagcgctactgcgccaacgtgatcggcgttgaacgctggcggcggttccgccgggtaattgtcaacgtcaacggggtatcggaatttcgcgcccgcgacgtcctgctgatcgatatgtccgcctccgatgtcgatttacgccagttctgcggcgagcaaatgcttgagccgatggtgctgcgcggcgagtattttgccgatcaggcgctggatgtggggatggcggaggtggcgctgatcccggattcagagatgattggcaaaacggtgcgtgagatagccttccgcacccggtttggtctcaatatcgtcggcatgaagcgcgatggcaaagcgatggatggttcggtggtcgacgagccgctgcagctcggcgatatcctgctggtggtcggcaactggcggcaaattgccctgctggcgaagcgcggccgggatttcgtggtgctcaatatgccggttgaggtcgatgacgcttcgccggcccacagccaggctccgcatgcgattttctgcctggtgctgatggtagccctgatgctcaccgatgaaattcccaacccgattgccgcgattatcgcctgtctgctgatgggcaaattccgctgcatcaatgccgagagcgcctacaaggcgatccactggccgagcattattttgattgttgggatgatgccgtttgccctggcgctgcaaaaaaccggcggggtggatctggtggtgaagggactgatggatgtcgccggaggcgaggggccttatctgatgctcggctgcctgttcatgatgtgcgcggcgattgggctgtttatctcaaacaccgccacggcggtgctgatggcgcctattgccttagcggcggcgaagtcaatgggcgtctctccctatccttttgccatggtggtggcgatggcggcttcggcggcgtttatgaccccggtctcctcgccggttaacaccctggtgcttggccctggcaagtactcatttagcgattttgtcaaaataggcgtgccctttaccatactggtgatggtggtctgcgtcctgctgatcccggtactgtttccgttttaagatattctggccgggtagagcacaaccgccgcccggccagaaccttacagcggcgaatcctggctaatttcgtccagcgacagctggaagcttgggacgaacacttgcataaagtaatccatctccgcgctgcgccgcgatgccagggtcttttccagccgacctttggccagcagaaattcgttattgcctgcagatagctcttcgaggcacttcaggtaagcgcagagggcgtcagcctgtttaacgatcgactgctcttcctcactgtagtgatgctcatcaatcagcggctcgaaaatatcgcgcagctcgtcagggaccatatccaccagcttttgctgagcaattttctcaatcgccttatattcctgggcaatctgcgaattgaaatatttcaccggagtagggaggtcgccagttagtacttccgaggcgtcatggtacatcgccagcagggcgatacgctcggcgttgacctggccgccaaatttgcggtttttaatcgccgccagcgcgtgggcgaccatcgccacctgcaggctgtgttcggagacattttcggtgcgcacgttgcgcatcagcggccagcggttaatcagtttcaggcgggagaggtgggcaaagaaatgactctgactcatagggacccttaatcagtgacaacatcgggttccattgtgcgcagggatcgccgccggatgcaaatgccggcggcggcgcgattaaagctgatggtagccggagaggaagcggccaaagcgggagatagccatctccaggtcgtcttcgcgcggcagggtcacgatgcgtacgtgatccggccacggccagttaaaggcggtgccttgcaccagcaggactttctcctgcagcaggaagtcgagcaccattttctggtcgtcatgaatattgaagcgtttggcgtcgattttcgggaacatatacagcgcgccttttggcttcacgcaggagacgcccggaatatcgttgataagctcccaggcgcggttgcgttgttcatacaggcgtccgccggggatgatgaattcgctgatgctctgatagccgcccagcgccgtctggatagcatgctgggccggcacgttggcgcaaagacgcattgaagccagcatctccagcccttcgatatagcccttcgcgtgttttttcgggccattcagcaccatccagccctgacggaagccggcaacgcggtaggttttcgacaatccgttaaaggtcaccgtcagcaggtccggcgccagggcggcaatagagtgatgctgggcttcgtcgtagaggatcttgtcgtaaatttcatcggcgaaaatgatcagattatgctgacgagcgatctccacgatctcctgcagcaattctttggaatagaccgcgccggtggggttgttagggttaatgatcacgatcccgcgggtgcgcggtgtgatttttgcgcggatgtcgtccagatccgggaaccagtcagaggattcgtcacacagatagtgtaccgctttgccgctggaaagcgacaccgccgccgtccacagcgggtagtccggggcgggaaccagcatctcatcgccgctgtttaacagcgcctgcatcgcctgcacaatcagttcggacacgccgttgccgatatagatgtcttccaccgtgacatcgcgcataccccgggcctggtaatgctgcatgatagctttacgcgccgagtacaatcctttcgaatcgcagtaaccctgggcggtaggcaaattgcggatgacgtcgacgaggatctcgtcaggggcctcgaagccgaatggcgccgggttgccgatgttcagtttcagaaccttattgccttcttcttcaagacgtttggcttctttcagaaccgggccgcggatgtcataacagacgttctctaacttgctggatttttcgatgggggacatgaatcttgaccttttagctgttatcgccactccctgccgtggaagtcagcacggaacaatgtactccccctccccgctgttttgaaggctttgcaggagaagattttgctaacgccggattttaagcgcaattgatttatctaccgattgcgggtttggtctgtggcttatgcctttttatgtcgattttttggtcgtaaatatagatttagtagcgattttgccatcatttatctcgtttgtttgcccggtaatatggggagggagaagggggagtcgctaaaaaacgctatcctgcatacaagcgcgattggcttgtaattttgatgttaaataattttaataaaaaacagcgtgcgaccacattattattatttttagcgggtaataatctgaggtttgttaattaatataaaatgttgaaaaaaatttaaaattgtctcagttaatccttattaaggcttataaaaaggagggggataggttagaatatcaccgttaatatccgtgttaaccgccaagaactgcggttgcattgagatttaatatattgttattacaggattttattgttccttttctgccggaaagttacgccagaagagcgattttctcagcatcactgaccgggttcccgcggcgacgtatggcgcctggctggtcgtggtaataaataataatgagaaatacgaacaatatattattccgcagttctgcgcatttgcccagacgagtactttggcatgtaataacgttcgtccagttgtttatccgccgttagacggtgagcacgaggctcagggaatagccggaaacctggcgtaaagcatcaacaaggcaggtcagcgttagccacctgtaagtgaagaaagatgattaatacaacacgtcccatactcaacctcgatctcgatctgctgcgtacctttgtcgcggtcgctgatttgaacacttttgccgccgccgccgccgcagtgtgtcgtactcagtccgcggtcagtcagcaaatgcaacgcctggaacagctggtgggcaaagagcttttcgcccgccacggccgcaataagctgctgaccgagcaggggatccagctgctgggctatgcccgcaaaattctccgttttaacgatgaagcctgtatgtcgctgatgtatggcagcctgcagggggctctgagcatcggtgcgtcagaagaaacggctgacaccatcctgccgtttttgttaaaccgcatcggctgtttctatcccagaatgacgttggagatcaaagttcatccccatgccgccatcatggagatgctggccgaggggctggtcgatctggcgttgaccacccatcagcctcccggctttacctcttttaccctgagaacatcacctactctctggtattgtgcagcggaatatgtgctggcgaagggggaatctatccccctgatcctgctcgaagagccaagtccattccgccaggatattatcgccgcgctggaaactgctcgcgtcagttggcatctggcccacggagcttcctcgctatcgggcgtgaaagcggcggtgaaggccgggctgggcgtgacggcgcgcccggtcgaaatgatgagcccggatctacgcgtggctggcatcagtgaggggttaccggcgttgccggacacccggtacgtcgtcagctgcaatccgcggacggtgagcgaactgccgcaggcgatttttcagtctctgagccaggagatccatccctgggaaacgggcacagcacttactccggaagagggagggaataccttggttttgtaagggtattcttgctaacaaagatcacaaaaactggtaacagaatgtaagtgcccaaaaagagcctcaggagttggtttcccgcctggcggctcttttttttgcactcttattgatgttttgaatcttttttgtatttctttgcagaaaaatcagcgtattggcgtgacaaggcgctcagcttgtcgacttttccctgcactttcaacacttcctgctaatgttaaaaaaccggatggattgttgccgatttcctggggtaattaacaaaaccgtgtcgcagatcaagaaaatacccctctttggggggaggaatcgaggctaaatcctgtcaaaatagaagggatttttgatttacgacggaaacggacacgattcaacaacactaaaaccgaacagtatgcaaggttatttcgcagaaaagggcatttaatgttaatgaaaagattccaatgtaaattaatgttatgaaaacttttgttaaagttgacaaaaggttaaagaaaggggtaaaaagccacggcatctgggcttctcacatcgaccagggacgcttttttgcacggttattttttattcctcccgtgaaacgctgtggcgttcatctgccagtaagagcagagggttttggcgctacacttttttggttaagcaatgcgtatgtcaacatccactgaagtcatcgctcatcattgggcattcgctatatttctcatcatcgctatcggcctgtgctgcctcatgctcgtcggcggctggtaccttggcggtcgcgcgcgcgcgcgtagtaaaaacacgccgtttgaatcggggatcgactccgtcggttcggcccgcttacgtctttctgcgaagttttatctggttgccatgttcttcgttatcttcgacgtggaagccctgtatctctacgcatggtcgacctctatccgcgagagcggctgggtcggctttgtggaagccgcaattttcattttagtgctactggctggtctggtttatctcgttcgcatcggcgcactggactggacgcctgcgcgttcccgtcgcacgctggttaacccggaaacagacagtcccactaaccgtcatatgcagtaaaagcgaggcaataagatggattatacgctcacccgcatagatcctaacggtgagaacgaccgttatcccctgcagaaacaggagatcgttaccgatcctctggagcaggaagtcaataaaagcgtgtatatggggaaactcgaacacgcgctgcatgacatggtgaactggggccgtaagaactcaatttggccgtacaacttcggcctttcttgctgttatgtggaaatggtgacgtcattcactgcggtgcatgacgttgcgcgttttggggcagaagttctgcgcgcctctccgcgtcaggcggacctgatggtggtcgcgggaacctgctttaccaaaatggcgccggttattcagcgtctctacgatcagatgctggagccgaagtgggtgatctccatgggcgcctgcgccaactcaggcgggatgtacgacatctattccgtcgtccagggcgtggataaattcattccggtcgatgtgtacatcccgggctgcccgccgcgtccggaggcctatatgcaggcgctgatgctgctgcaggagtccattggtaaagaacgtcgtccgctctcatgggtggttggcgatcagggcgtttatcgcgccaatatgcagtcggaacgcgagcgtaaacgcggcgaacgtattgcagtgaccaatctgcggacgccggacgagatttaatttgcgcctgcgggcgggagaaccacttcgcaaatcaatctacaacagcgcgaagtctcgccggcagtcaccacggaccttttgcaatggtgaacaatatgaccgatttaaccgcgcatgacgccgcaccagcctggcaaacccgcgatcaccttgatgacccggtgattggcgaactgcgcaaccgctttgggccggatgcctttaccgttcagccaacccgtaccggcgtaccggtggtatgggtgaagcgtgaacagctgctggaggtgggtgatttcctgaagaaattgccgaagccttacgtgatgctgtttgacctgcacggcatggacgaacgtctgcgcacgcaccgcgatggcctgcccgccgcggatttttccgttttctatcacctgatctccatcgatcgcaaccgcgacatcatgctcaaggtggcgctgtcggaaaacgatctgcatctgccgaccttcaccaaactgttccccaacgccaactggtatgagcgtgaaacctgggaaatgtttggcattaccttcgatggtcacccgaacctgcgtcgcatcatgatgccgccgacctgggaaggtcacccgctgcgtaaagattatccggcgcgtgccaccgagttcgacccgtttgagctgaccaaagccaaacaggatctggagatggaggcgctgacctttaaaccggaagagtggggcatgaagcgcggcaccgacaacgaggacttcatgttcctcaacctcggtccgaaccacccatcggcgcatggtgcgttccgcattattctgcagctggacggcgaagagatcgtcgactgcgtaccggatatcggttatcaccaccgcggcgccgagaagatgggcgagcgtcagtcctggcacagctacatcccgtataccgaccgtattgaatatctcggcggctgcgtcaacgagatgccgtacgtgctggcggtggaaaaactggctgggatcaccgtaccggatcgcgtgaacgtgatccgcgtgatgctctccgagctgttccgcatcaacagccacctgctgtatatctcgacctttattcaggacgtcggcgcgatgacgccggtcttcttcgcctttaccgatcggcagaaaatttacgatctggtggaagcgattaccgggttccgtatgcacccggcgtggttccgcatcggcggcgtcgcgcacgatctgccgcgtggctgggatcgcctgctgcgtgagttcctcgagtggatgccgaagcgtctggactcctatgagaaggccgccctgcgcaacaccattctgaaaggccgttccgtcggcgtggcagcctataccgccaaagaggcgctggagtggggcaccaccggcgcaggcctgcgcgccaccggtatcgacttcgacgtgcgtaaatggcgtccttactctggctatgaaaacttcgacttcgaagtcccgaccggggggggcgtctcagactgctacacccgcgtgatgctgaaagtagaagagctgcgccagagtctgcgcattcttcagcagtgcctcgataacatgccggaaggcccgttcaaagcggatcacccgctgaccacgccgccgccgaaagagcgcacgctgcagcatatcgaaaccctgatcacccacttcctgcaggtatcgtggggcccggtgatgccggccaacgaatctttccagatgattgaggcgaccaaagggatcaacagttactacctgaccagcgacggcagcaccatgagctaccgcacccgcgtgcgtacgccgagctttgcgcacctgcagcagatcccgtcggcgatccgcggcagcctggtatccgacctgatcgtctatctgggtagtatcgattttgttatgtcagacgtggaccgctaattatgcacgagaatcaacaaccacaaaccgaggcttttgagctgagtgcggcagagcgtgaggctattgagcacgagaagcaccactacgaagacccgcgtgcggcgtccatcgaagcgctgaaaatcgttcagaaacagcgcggctgggtgccggatggcgcgatctacgctatcgccgatgtgctggggatcccggccagcgacgtggaaggcgtggcgacgttctacagccagattttccgccagccggttggccgtcacgtgatccgctactgcgacagcgtggtatgccacatcaccggctatcagggtattcaggccgccattgagaagaaactgaatatcaagccggggcagaccacctttgatggccgctttaccctgctgccgacctgctgcctgggtaactgcgacaagggaccgaccatgatgattgatgaggatactcacagccatctgacgccggaggcaattcctgacctgcgggagcagtacaaatgaaaaccgtaattcgtactgcggaaacgcatccgctcacctggcgcctgcgcgacgacaagcagccggtgtggctggacgagtatcgcagtaaaaatggctatgaaggggcgcgtaaagccctgaccgggatggccccggatgagattgtcacggcggtaaaagacgctggcctgaaagggcgcggcggcgcgggcttctctactggtctgaagtggagcctgatgccgaaagacgaatccatgaacatccgttacctgctgtgtaacgccgatgaaatggagccgggcacctataaagaccgcctgctgatggagcagctgccgcacctgctggtggaaggcatgctgatctccgcgtttgcgctgaaagcgtaccgcggctacatcttcctgcgcggagaatatattgaagcggcccagcatctgcgtcgcgcgattgctgaagccaccgaagcgggtctgttggggaaaaacatcctcggcaccgggtttgacttcgagctgttcgtgcacaccggggcagggcgctatatctgcggcgaagagacggcgctgatcaactctctggaaggccgccgcgccaacccgcgatccaagccgccgttcccggcgagctccggcgtctggggcaagccgacctgcgtcaacaacgtagaaaccctgtgcaacgtgccagcgatcctcgccaacggcgtcgagtggtaccagaacatttccaccagcaaagatgctggcaccaagctgatgggcttctccggccgggtgaagaatccgggcgtctgggagctgccgttcggcaccactgcccgcgagatcctcgaagattacgccggcggtatgcgcgatggcctgaagtttaaagcctggcaaccgggcggagcagggaccgacttcctcaccgaagcgcacctcgatctgccgatggaattcgaaagcattggtaaagcgggcagccgtctgggcacctcgctggcgatggccgttgaccacgagatcaacatggtctcgctggtgcgtaaccttgaagagttctttgcccgcgagtcctgcggctggtgtacgccgtgccgcgatggtctgccgtggagcgtgaagatcctgcgcgccctggagcgcggcgaaggccagcctggcgatatcgaaacccttgagcaactgtgtcgattcctgggcccgggtaaaaccttctgcgcgcacgcgccgggtgcggtcgagccgctacagagcgcgattaaatatttccgcgaagaattcgaggctggcattaagcagcagttcagcaatacccatgcaatcaacgggattcagccgaacctgcttaagacgcgctggtaatctaaaggttttttatttttggaagcacgcaaatggctacgattcatgtagacggcaaagaatacgaggtcaacggggcggacaacctgctagaggcttgtctctctcttggtcttgatattccctacttttgctggcacccggcgctagggagcgtcggtgcttgccgccagtgtgcggtgaagcaatatcagaacgcggaagacacgcgtggtcgcctggtgatgtcctgtatgactccggcatccgacggcacctttatttctatcgacgacagcgaagcgaagcagttccgcgaaagcgtggtggagtggttgatgactaaccacccgcacgactgcccggtctgcgaagagggcggcaactgccacctgcaggatatgacggtgatgaccggtcatagcttccgccgctatcgtttcaccaagcgtacccaccgcaatcaggatctggggccgtttatttcgcacgaaatgaaccgctgcatcgcctgctaccgctgcgtgcgctactacaaagattatgccgacggcaccgatctgggcgtctatggcgcgcacgacaacgtctacttcggccgcccggaagatggcaccctggagagcgagttctccggcaacctggtggaagtctgcccgaccggcgttttcaccgacaaaacccactccgagcgctataaccgtaagtgggacatgcagtttgcgccgagcatctgccagcagtgttccatcggctgtaacatcagcccgggcgaacgctatggcgagttgcgtcgtatcgaaaaccgctataacggtaccgtgaaccgctacttcctctgcgaccgcggtcgtttcggctatggctacgtgaacctgaaagaccgtccgcgtcagccggtacagcgccgcggcgacgatctgatcacccttaacgccgagcaggcgatgcagggggcggcggatatcctgcgccagtcgaagaaagtgatcggcatcggctccccgcgcgccagcattgaaagcaacttcgcgctgcgcgagctggtgggcgccgacaacttctataccggtatcgccaaaggcgaacaagcgcgcctgcagatgatgctgaaagtgctgcgcgagggcgggatccacacgccaagcctgcgcgatatcgaatcctacgatgcggtactggtgctgggcgaagacattacccagaccggcgcgcgcgtggccctggcggtacgccaggcagtgaaagggaaagcacgcgaaatggcggcggcgcagaaagtggccgactggcagatcgccgcgatcctcaacatcggccagcgcgccaagcacccgctattcgtcaccaacgtcgatgacacccgcctggatgacatcgcggcgtggacctaccgcgcgccggtagaagatcaggcgcgtctcggctttgctattgcccatgcgctggacgacagcgcgccggcggttgacggcctgagccaggacctgcagggtaaagtcgacgttatcgttcaggcgctggccggggcgaaaaaaccgctgatcatctccgggaccaacgcaggcagcatggagatcatccaggccgccgctaacgtggcgaaagctctgaaaggccgcggcgccgatgtcggggtgaccatggtcgcccgggcggttaacagcgtcggactgggcatgatcggcggcggctcgcttgaagaggcgctggacgaactggaaagcggcgccgcagacgcggttatcgtgctggaaaacgaccttcaccgtcatgcttccgccgcgcgcgttgacgctgcgctggcgaaagcgccgctggtgatggtggtggatcatcagcgcaccgcgattatggacaaagcgcacctggtgctctccgcggcaagctttgcggaaagcgacggtaccgtggtgaacaacgaaggccgcgcccaacgtttcttccaggtttacgatccggcttactacgacgcgaaaaccgtaatgctggaaagctggcgctggctgcattcgctgcacagcaccgtcaacaaccgtcaggttgactggactcagctggaccacgtcattgatgcggcgattgcggcgctgccgcagctggcgggcattaaagacgccgcgccggatgcgaccttccgcatccgcggccagaagctggcgcgtgaaccgcaccgctacagcggccgcacggcgatgcgcgctaacatcagcgtgcacgagccgcgtcagccgcaggataaagacacgatgttcgccttctccatggaagggaacaaccagccgtccgccccgcgttcgcagatcccgttcgcctgggcgccgggctggaactccccgcaggcatggaacaagttccaggatgaagtgggcgggaaactgcgccacggcgatccgggcgttcgtctgtttgaagcgtccgccagcggactggagtacttcacggcggtgccggccagcttccaggcggaagagggcaaatggcgaattgcgccgtactaccatctgttcggcagcgatgagctgtctcagcgcgcgccggtgttccagagccggatgcctgagccgtacatcaagctgaacccggcggatgccgcgaagcttggcgtcaacccaggcgcaatgctctcctttagcgtggaaggccagaccctgcgtctgccgctggttatctctgaaggcctgaccgcgggacaggttggcttaccgatgggcatgccgggcattgcgccggtgctgaccggatcgcgtattgattcactgcaggaggcgaaagcatgagctggttaacgccggatcttatcgacattctgttaagcatcctgaaggccgtggtcattctgctggtggttgtcacctgcggcgcgttcatgagcttcggcgagcgtcgtctgctcggcttgttccagaaccgctacggacctaaccgcgtcggctggggcggttcgctgcagctggtcgccgacatgatcaagatgttctttaaagaggactggatcccgcgcttctccgatcgcgtgatctttactctggcgccggttatcgcctttacctcgctgctgctggccttcgctatcgtgccggttagcccgacgtgggtggtggccgacctgaacatcggcatcctcttcttcctgatgatggctggcctggcggtctacgcggtgctgttcgccggttggtcgagcaataacaaatactcgctgctgggggcgatgcgtgcttccgcgcagaccctgagctacgaggtatttctcggtctctccctgatgggcgtggtggcgcaggcggggtcattcaatatgaccgatatcgtcaataaccaggcgcatctgtggaacgttatcccgcagttcttcggcttcgtgactttcgccatcgccggcgtggcggtgtgtcaccgtcacccgttcgaccagccggaagcggagcaggaactggccgatggttaccacattgaatattccggcatgaaattcggtctgttcttcgtcggggaatacatcggtatcgtcaccgtttcagcgctgatcgtcacgctgttcttcggcggctggaatggcccgtggttacctcctttcatctggttcgcgctgaaaaccgcgttcttcatgatgatgttcattttgatccgcgcatcattaccgcgtccgcgctatgaccaggtaatgtcctttggctggaaggtatgcctgccgttaacgctggtcaacttgttggtaacggcggctgtcattctctggcaggcgcaataaggggtgaattgaacatgaccttaaaagaattattggtggggttcggcacccaggtccgtagtatctggatgattggcctgcatgccttcgccaaacgtgaaacccggatgtatccggaagagccggtctacctgccgccgcgctatcgcggccgcatcgtgctgacccgcgatccggacggtgcagagcgctgcgtcgcctgtaacctgtgtgcggtagcctgcccggtgggctgtatctcgctgcagaaagcagagacggtagacggccgctggtatccggagttcttccgcatcaacttctcacgctgcatcttctgcggcctgtgcgaagaagcgtgcccgaccacggcgatccagttgaccccggacttcgagctgggtgaatacaagcgtcaggatctggtgtacgaaaaagaggatctgctgatttccggtccgggcaaatacccggaatataacttctaccggatggcgggtatggcaatcgacggcaaagataagggcgaagcggaaaatgaagctaagccaatcgacgtcaagagcctgttaccgtaaggagaggggcaatggaattcgctttttatatctgtggcctgatagccatcctcgcaaccttgcgggtcgtcacccacaccaatccggtgcatgcgctgctgtacctgattatttcgctgctggcgattgccggggtgttcttctcgctgggcgcgtacttcgccggagcgctggaaatcatcgtctacgccggagccattatggtgctgttcgtcttcgtggtgatgatgctcaacctgggcggcaccgagatcgaacaggagcgcaagtggctgcagccggggatctggattggcccggccatcctctccgcggtgctgctggtggttatcgtttacgccatcctgggcattaacgaccagggtatcgacggtgcggcgattaacgccaaagaagtgggcattgcgctgtttgggccgtacgtcctggcggtggagctggcctccatgctgctgctggcgggcctggtggttgccttccacattggccgcgaagagcgcgccggcgaggtgctgagcaaccgtctgaacgacagcgacaaacgaaaaacggaggaacacgcatgatccccttaacacatggactgatcctcgcggccatcctgtttgtgcttggtctgacggggctggtgatccgccgcaatctgctgtttatgttgattagcctggaaatcatgattaacgccgccgcgctggcctttgtggtggcgggtagctactggggtcaggcagatggtcagataatgtatatcctcgccatcagcctcgcggctgcggaagcgagtatcggcctggcgctgctgctgcagctccatcgtcgccgccagaacctgaacatcgattcagtaagtgagttgcgtggatgaacatgcttgccttaaccattcttttgccattgattggctttgtgctgctggccttctcccgcgggcgctggtcggaaaatctttccgccgccgttggcatgggctcggtaggcctggcggcgctggtcaccgcgtacgttggcgtcgactttttcgctaacggcaaacaggcggtcagcgtgccgctgtggacctggatgtcggtcggtgatttcaacatcggcttcaacctggtgttggacggcctgtcgctgaccatgctctccgtagttaccggcgtcggcttcctgatccacatgttcgcctcctggtacatgcgcggtgaagagggatattcccgcttcttcgcctataccaacctgtttatcgccagcatggtggttctggtactggccgataacctgctgctgatgtacctcggttgggaaggcgtgggcctctgttcttacctgctgatcggtttctactacaccgatccgaagaacggcgccgcagcgatgaaagcgtttgtggtgacccgcgtcggcgacgtgttcctcgccttcgcgctgttcattctttataacgaactgggcaccctgaacttccgcgaaatggtggagctggcgccgcagcacttcgctaacggcagcaccacgctgcagtgggcgacgctgatgctgcttggcggcgcggtcggtaaatccgcccagctgccgctgcaaacgtggcttgccgatgcgatggcgggtccgacgccggtctctgcgctgatccacgccgcgaccatggtcaccgcgggcggctatctgatcgcccgtacccacggcctgttcctgatgacgccggaagtgctgcatctggtcggtatcgtcggggcggtcaccctggtgttggcgggcttcgccgcgctggtgcagaccgatatcaaacgcgttctcgcctactctaccatgagccagattggctacatgttcctcgcgctgggcgtgcaggcatgggacgcggcgattttccacctgatgactcacgcgttctttaaagcgctgctgttcctgtcgtctggttcggtcattctggcctgccatcacgaacagaacatcttcaagatgggcggcctgcgcaaatcgattccgctggtatacgtctgcttcctggtggggggcgcggcgctgtccgcactgccgcttatcaccgcaggcttcttcagtaaggatgagattctggcaggcgcgatggccaatggccatatcaatctgatggtggcaggcctggtcggcgcctttatgacctcgctgtacaccttccggatgattttcatcgtattccacggtaaagagcaaattcacgcgcacgcagggaaggggattacccatcatctgccgctgattgtgctgctggtactatccaccttcgttggcgcgctgattgtgccgccgctggagggcgtactgccgcagaccactgagctcgcccacggtagcgtgatgacgctggagattgcctccgggatcatcgccattgccgggattctgatcgctgcatggctgtggctgggcaaacgcacgctggtgacctccatcgccaacagtgcgcctggccgcttcttcggtacctggtggttccatgcctggggcttcgactggttatacgacaaggtgttcgtaaaaccattcctcggtattgcctggctgctgaaacgcgatccgctgaactcgttgatgaatatcccggcgatcctttcccgcttcgcaggcaaaggcctgctggtgagcgagaacggttatctgcgctggtatgtggcttcaatgagcatcggcgcggtggtggtgctggcgctgctgatggtattgcgttgatttgatcgcgcggttttgcccggtggcgcttcgcttaccgggcctacgagaccgtaggtcgggtaagcgaagcgccacccgacacaacaaaccgcactcaaacgtgaatgtagtcgaattcgttgaaaatcggtcctgaacgggactttaacaaggaataaaaatcgccatgttactaccctggctaatattaattccctttatcggcggcttcctgtgctggcagaccgaacgctttggcgtgaaagtgccgcgctggatcgcgctgattaccatgggactgacgctggtgcttggcctgcagctgtggatgcagggcggctattctctgacgcaatccgcgggtattccgcaatggcagtcggaattcgtgctgccgtggatcccacgcttcggcattagcatccatctggcgatcgacggcctgtcgctgctgatggtggtgctgaccggtctcctcggcgtgctggcggtgctctgttcgtggcgtgaaatcgaaaaataccagggcttcttccacctcaacctgatgtggatcctgggcggcgttatcggcgtgttcctcgccatcgacatgttcctgttctgcttcttctgggaaatgatgttggtgccgatgtacttcctgatcgcgctgtggggccacaaagcctcggacggtaaaacgcgcatcacagcggccaccaagttcttcatctatacccaggcgagcggcctggtgatgctgattgccattctggcgctggccttcgtccacttcaacgccaccggcgtgtggaccttcaactatgaagatctgctgaaaaccccaatgtctcacggcgtggaatacctgctgatgctcggcttcttcatcgccttcgcggtgaaaatgccggtggtgccgctgcacggctggctgccggacgctcactcccaggcgccgaccgccggctctgtcgacctcgcggggatcctgctgaaaaccgccgcctacggtctgctgcgctttgcgctgccgctgttcccgaatgcctccgccgagtttgcgcccatcgctatgtggctgggcgtgatcggtatcttctacggcgcgtggatggccttcgcccagaccgatattaaacgcctgatcgcctacacctccgtgtcccacatgggcttcgtgctgattgctatctacaccggcagccagctggcctatcagggagcggtgatccagatgattgctcacggtctgtccgcggcgggtctgtttattctctgcggccagctgtacgaacgtctgcacacccgcgatatgcgccaaatgggcggtctgtggagcaaaattaaatggctgccggcgatgtcgatgttcttcgcggtcgccactctggggatgccgggcaccggtaacttcgtcggcgaatttatgatcctgttcggcagctataaagtggtgccgacgatcaccgtcatctccacctttggtctggtattcgcgtccgtttactcgctgtcgatgttacatcgcgcttacttcggtaaagcgaagagcgaagtggcggcgaaagagttgccggggatgtccctgcgtgaactgtctatcatcctgctgctggtggtgctgctggtgctgttgggcttcttcccgcagccgatcctcgacacctcgcatgctgcgatgagcaacattcagcagtggtttgttaattctgtttctactacaaggccgtaattcgccatgacaataactccacaacaactgatcgcactgctaccgctgctgatcgtcggcttgacggtggtggttgtgatgctctccattgcgtggcgacgcaatcattttctcaatgccacgctgtcggttcttggacttaacgccgcgctggtctcgctctggttcgtcggccagaacggggcgatggacgtcacgccgctgatccgcgttgacggctacgccatgctttacaccggtctggtgctgctggcgagcctcgcgacctgtacttttgcctacccgtggcttgagggttacaaggacaacaaagaagagttctacctgctggtgctgatcgccgccctgggcggcattctgctggccggtgcgaatcatctggcggcgctgttcctcggtattgagctgatttcgctgccgctgttcggcctggttggttacgccttccgccagaagcgttcgctggaagcgagcatcaaatacaccatcctctccgcggcagcttcgtccttcctgctgttcggtatggcgctggtgtatgcgaactccggcaacctgtccttcctcgcgctgggcaaaagcctggcggacaacatgctgcacgagccgctgctgctggcgggtcttggcctgatgattgtcggtcttggctttaaactgtcgctggtgccgttccacctgtggacgccggacgtttaccagggggcgcctgcgccggtctccaccttcctggcgaccgccagcaagatcgctatcttcggcgtagtgatgcgtctgttcctgtacatgccggtgggcaacagcgaagcggtacgcgtggtgctgggcctgatcgccttcgcctctatcatcttcggtaacctgatggcgctgagccagaccaacattaagcgcctgctcggttactcttccatctcccatctcggctatctgctggtggcgctgattgccctgcagagcggtgaaatgtcgatggaagccgtgggcgtttacctggccggttacctgttcagcagcctcggcgcgttcggcgtggtcagcctgatgtccagcccgtaccgcggcccggatgctgactcgctgttctcctaccgcggcctgttctggcaccgtccgatcctgtcggctgtgatgacggtgatgatgctctccctggccggcatcccgatgaccctcggctttatcggtaagttctacgtgctggccgtcggtgtgcatgcgcatctgtggtggctggttgccgcggtggttgtcggctcggcgatcggtctctactactacctgcgcggggccgtcagcctgtacctgagcgcgccggagcaactgaatcgcgatgcgccgtcaaactggcagtacagcgccggcggtatcgtggtgctgatctccgcgctgctggtgctggtgctcggtatctggccgcagccgctgattagcatcgtgcagctggcgacgccgctgatgtaagttgattgactcaataaaaaaccgccgggatggcggtttttttatgcccggattttacgccatcttgtagaccataaagtcttccgccagcagcgtgttagggaaaatctcccggcattccgccagcatacgcagacagccttcggcatcgtagcgcgagctaaagtgggtggcgatcagcgtaccgacccccgcttctttggcaagcgccgcggtctgctgactggaagagtggccgcggctattggctttctccgccatcgcctgctcaagggtggtttcgtggaccattacatccgccccgcgagccatctccagcgcctgcgggcagggggcggtatcgccgaagatggtcagcgttttacccggggtcgctggccccagatagcggctgccgtcgatgacccggccatctgccagcgtgacgcgctgtccgcgcttgagttgatggaacagcggcccgggaggcacgccatcggcaatcagctgggcggcgtcgagggtgccgggcttgtcatgctgcgcaatgcgatacccatagcactccaccggatggctgagcggatacgcggtgacccgatagccctcttcgtcgaacaccagaccagggccgacttcgatgatggtgagcggatagtcggtccacgaaccgctcaggcgcagcgcggtctcaacaaactctttgagtccttttggcccgtagagggtgaggggcagggagtttccctgcatcgagcggctgcacagcaggccgggcaggccgaacaggtggtcgccgtgcagatgggtaataaaaatcttattcagtttgccgggatggtagggcgtgtgaagaaactgatgctgggtcccttcgccgcagtcaaacaaccacatttcagcgcgggtcggctgttgcaaattcagtattatcgacgtcatattacgcgtgcgggtcggcaccccggcggatgtccccaaaaaagttaattccatcgtccagtgtcctcagggcgagtcgcaaagtatcagtatatcaataaggagcagcagatgatgacctggcaggatctccaccatagtgaactcaccgttccccagctgtatgcgctgctgaaattgcgcagtgaagtctttgtcgtagagcagcagtgcgtctatcaggatgtcgacggcgatgatttggttggtgaaaatcgccatctgctcggctggcgcgatggcgaactggtggcctacgcgcggatcctcaaaagcgaagaggagtttgcgccggtggtgattggccgggttatcgtcagcacggccgcccgcggtgagaggcttggctatcagctgatggagcaggcgctggccagctgtcagcagcactggccgcaaaaggcgatttacctcggggcgcaggcgcacctgcaatccttttacgcccactttggttttacgccggtgaccgaggtctatgatgaggatggcatcccccatattggcatggcgcgagaaaagcgcgctgtctgactcctctgccccctcgtccagacgctgctctgacccggcgagcgggtaagataaaacccgctccctcatcatgggtactgctattccgccgtcgaaccccttataatgtggggttttactaccgtggaggtttgcgtgctgtctgtttccactgcgctggcccgtttgcaagacggcctgggcgagtcttttccagactcgcccggcacgcgaattatcgatgttgcctttccgctgaatgatgccttcgatccgctactatggtgcggccagcaggcgcaatggccgcagttttactggcagcagcgcaatggcgatgaggaactggcgacgctgggggcggtaaaaacctttttctcgctcgacgcggcgaaccgctttttacgccaggccggccggcaggatctgcgtatctgcggcctgaatgcgtttgaaccgcagcagggcagcctggcgctgccgcgtctggagtggcgccggtgcggcggcagggccgtgctgcggctggtgctgcatagtgatatctccctgcgtgaggatgccgcgacggcccgcgcgtttctcgccagcctgacaaccactcaggcgactcccggtgccataccgccgttgctgagcgagcgccactcatccgactatcctcaatggcaggcaatgattgcgcgggcgactaaggcgatcagcgccggtgaaatggataaagtagtgctggcgcgggcaaccgacctgcagtttgccgccccgctggacgccatgagcatcatggcggctagccggcgcagcaatcttaactgttttcatttcctgatggcgttcaatgcccggcaggcatttttcggctccacgccggaacggctgtggcgccggcgcggcgcgctgctgcgcaccgaagcgctggcggggaccgtcgcgaaccatcaggaagacgcgaaggcgcagcaactggccgactggttgatgaaagacgacaaaaaccagcgggaaaacatgctggtggtagaggatatctgccagcgcctgcagagtgaggcctcgacgctggacgtcctgccgccgcaggtggtgaggctgcgtaaggtgcagcatctccgacgctgcatctggaccgagctggcggcgcctgacgacagccgctgtctgctgcagctgcagcccaccgccgcggtggccggcctgccgcgccgggcggcgctggcgttcattcagcgtcatgaaccgttttcccgcgaatggtacgccgggtccgccgggtatctgtcactggcgcaaagcgagttttgcgtggcgctgcgttcggcgaaagtgaaccacgacaccctgcggctgtatgccggggcggggatcgtcagcggctctgatgcacagcaggagtggcaggagattgacaacaaagcggccgggctgcgctcgctgctgtgtccataaagcttgaatgacgatgcatatcaaaacgacgtcactttgccttatctatacttagcatcaatatttgataccggacaatttcatgtcagtaagcgcatttaaccgacgctgggcggcggtgatcctggaagctttaacgcgccatggcgtgcagcatatctgcatcgcgccgggctcacgctcgacacccttaaccctggcggcggcggaaaaccgcgcctttatccatcatacccatttcgacgaacgcggcctcggccacctggcgctcggactggcgaaggccagccggcagccggtggcggtgatagtcacctccgggaccgccaccgcaaacctctatccggcgctgattgaggcagggctcaccggtgaaaagctgatcctgttaaccgccgaccgtccgccggagctgatcgactgcggcgcgaaccaggctatccgccagccggggatgtttgcctcccatcctgcgcagacgatttctttgccgcgtccctcgcaggatattcctgcccgctggctggtctcaaccatcgaccaggcgctgggcgcgctgcacgccggcggggtgcatattaactgtccgttcgctgaaccgctgtatggtgatatggatgagaccggcgtggagtggcagcagcagctcggcaactggtggcagagcgacaaaccctggctgcgccaggcgctgcagttagagagcgagaagcagcgcgactggttcttctggcgacaaaaacgcggcgtcgtcgtggcgggcagaatgagcgccgcggaagggaaaaaggtcgctgagtgggcgcagaccctcggctggccgctgatcggcgatgtcctgtcgcagaccgggcagccgctgccgtgcgccgacctgtggctgggcaacggcaaagcggtcagcgagctggcgcaggcgcagatcgtcgtgcaactcggcagcagcctgaccggcaaacgcgtgctccagtggcaggcgacctgcgagccggatgaatactggctggtggataatctgcccggtcgcctcgacccggcgcagcaccgcggtcgccgtctgctctcaagcgttgagcgctggctcgaattacatccggcggagaaacgccagccgtgggcgacggtgatcccacagcttgccgggcaggcgtggcaggctgcagtcgccagcaacgagccttttggcgaagcgcagctggcgcagcgtattcggggctatctgccggagcagggccaattgtttgttggcaacagcctggtggtgcgcctgatcgacgccctggcgcagctaccggccgggtatccggtctacagcaaccgcggcgccagcggcatcgatggcctgatcgccactgcggccggcgtgcagcgcgccagcgcccgaccgacgctggccatcgttggcgatctctccgcgctctacgatctcaactcgctggccctgctgcgccaggcgtcggcgccgctggtgctgatcgtggtgaataacaacggcgggcagattttttctatgctgccgacgccgcaggacgaacgccgtcagttctatttaatgccgcaggacgtggatttcagccacgcggcggcgatgttcggcctggcctatcatcgccctgatgactggccgtcgctggatgaggcgctggccggcgcctggcgcagggcaggggcgacggtgattgagctggcggtcaatgagaccgacggcgcgcagaccctccagcagctgctggcgcaggtaagtcgcctgtgatcctcagcgctgctgtcgacaacggccagccgggctatccctggctggtgtttctgcacggtttttccggcgaccgcaacgagtggcggaaagtgggcgacgcctttcccgcctggccgcggctgtacctcgatctgccggggcacggcggctccgcggatatcgcggtgcaggactttgccggggtcaatactctgctgcagtctatgtttaatagttacaacatacataagtattggctgatcggctactcgctgggcggccgggtggcaatgaacttcgccagccatgcgcgcgcaggcatgcgcgggctgatcgttgaaggcggccatccgggcctgcaggatgcagaggcgcggcaggcgcggcgcagcaatgaccgcgcctgggcggaacgttttcgccgcgagccgcttgagcaggtctttgccgactggtatcagcagccggtcttcgcttcgctgaatgccgcgcagcgtgagtcattggtcgccttacgcagccggaacaacggcgcgatgctggcggcgatgctgcaggcaacctcccttgccgcgcaggccgatctgcgcgcgtctctgcaggcgcgcgattttccttttcactacctgtgcggcgagcgcgacgcgaagtttcgcgccatcgcgcagacgctcgcggcggatctccatcttattcaccatgccggacacaacgcgcaccgggacaacccggcggcggtgattgcctgtctggcgcagattctggcaagttaactgaaggacattctatgatctctcttgatgaagcaatgctctacgcccccgttgaatggcacgattgctccgaaggctataccgatattcgctatcacaaatcgactgacgggattgccaaaatcaccattaatcgtccgcaggtgcgcaacgccttccgcccgctgaccgtcaaagagatgattcaggcgctggcggatgcccggtatgacgacaatatcggcgtcatcgtgctgaccggtgaaggtgagaaagccttctgcgccggcggcgaccagaaagtccgcggcgactacggcggctatcaggacgactccggcgttcatcatcttaacgtgctcgacttccagcgtcagatccgcacctgtccaaaaccggtggtggcgatggtggccggctactctatcggcggcggtcacgtgctgcatatgatgtgcgatctgactatcgcggcggaaaacgccatcttcggccagaccgggccaaaagtcggctctttcgacggcggctggggcgcctcctatatggcgcggatcgtcgggcagaaaaaagcgcgcgaaatctggttcctgtgccgccagtatgacgctcagcaggcgctggacatggggctggtgaataccgtggtaccgctggcggatctggaaaaagagaccgtgcgctggtgtcgtgaaatgctgcagaacagcccgatggccttgcgctgcctgaaagcggcgctgaacgccgactgcgacggccaggctggtctgcaggagctggcgggcaacgccaccatgctgttctatatgacggaagaggggcaggaaggacgcaacgccttcaaccagaaacgtcagccggacttcagcaaatttaaacggaatccataatgcgcgtttcgcaggtttaccgctggcagataccgatggacgcgggcgtggtgctgcgcgagcggcggttaaaaacccgcgacgggctgttcatccgcctgcaggagggtgaacgcgaaggctggggcgaaatttctcccctgccgggattcagtgtcgagacgctggaagaggcgcaaatggcgctgttagcgtgggcacaggcctggcgcgacggcgccgagccgccgcttcccacgcagccctccgtcgcgtttggcatcagctgcgcgcaggcggagcttggcggcgaactaccgcaggccgcggattatcgcgcggcgccgctctgctccggcgatccggatgagctattcgccagactggcggcgatgcccggcgagaaggtcgctaaggtcaaagttggcctctgggaggcggtccgcgacggtatggtggtcaatctgctgctggaggcgatccccgacctgcagctgcggctcgatgccaaccgcgcctggacgccgctcaaagcgcaacagttcgccaaatacgttaatccggcgtaccgccagcgcattgcttttcttgaagaaccttgcaaaacgcgggaggattctcgggcctttagccgcgagacagggatcgctatcgcctgggatgaaagcctgcgcgaggcggatttccgctttgtcgccgagccgggcgtacgtgcggtggtgatcaaaccgacgctaaccggcagtttgcagaaggtgcagcaacaggtcgccgcggcgcatgcgctggggttgagcgtagtgatcagctcgtcgatcgagtccagcctcggcttgacccagctggcgcggattgccgcctggctgacgccgcagactattcctgggctggatacgctgtcgctgatgggcgcccagctggtacggccgtggcccgaaagtgcgctgccggtgctcaacattgatgcgctggagccgctgctgtgacctttaacgactggccctggcggcattggcgtcagcggcgcggagaggccctcgccttacgtctgaataaccagccgctgacctggcgggagctatgcgcgcgggttgacgcgctggcgtctggttttgccgcgcagggcgtaatggaagggcagggcgtggcgctccgggcctataaccagccggaaactctgctggcatggctggcgctgctacagtgcggggcgcgggtgctgccgctgaatccgcagctgccagcggtgttgctgcaggcgttgttacccgcgttaaccatgcagcatcagctggtgctgaatggcgatgtgttgccggggaatttaccgatgttaaccctgcagttggtcgagggcgagcatgctgcttgctggcatggcgatcggttgctgtcgatgacgttgacctccggttcaaccggcctgccgaaagcggcggtacatagcgccaacgcccatctggccagcgcggctggcgtgctggcgctgatgccgtttgccgcaggagatgactggctgctgtcgctgccgttgttccatgtctccggtcaggggatcgtctggcgctggctgctggccggcgcgcgactcacggtacgtgacaaacagccgctggcgcagatgctgcacggctgtacccatgcttcgctggtgccgactcagctatggcgcctgctgaatgatgatgctgcggtttccctcaaggcggtgctgctcggcggcgcgtcgatcccggtcgaattgactgaacgggcgcgaaagcagggcatacgcagcttctgcggctatggcctcaccgaattcgcctccaccgtgtgtgccaaagaggccgacggcgctgcggatgttggcgaagcgctgccggggcgagaggtgaaaatagtcgccggcgagatctggctgcgggcgtcgagtatggccgcaggctactggcgggatggtcaattgttgtcattaaccaacaatgaaggctggtttgcgacgcgcgatcgcggagcattgcataacggtcggctgacggttgttgggcgaatggataacctcttttttagcggtggagaaggtattcaaccggaagaggtcgagcgtgtgatactcgcccatccacaggtacagcaggtgtttatcgtgccgctggatgatgcggaatatggccagcgcccggtagcggtggtggaatgcgatgacggctgcgagttgagcgcgctggcggcatggagcgctgagcggttagcgcgttttcagcagccggtgcgttggctgcggttgccggaaacgttaaaaaacggcgggattaagatttcgcgccgggcgctgtgcgagtgggtcaggcagcagacgcatgcgaccgtatcgtagccacccgcattatcccgcggcataacgccgggtgggttgaacgcggtatgctggactaaagtagccctttcaggctgagagtaacgcgggtggcggcattaagatcgtagtttttgagatcttcggctttgacccaggcgtaatcgtcaaactcctcgttgatcgtcacatcgcgattggcgctcacgcagtcgaagatgagatagatcatgtagatcgtttcctgatgcccgtcggggtaggttttgacgcgggtatcgtcgcgaaagcaccatggcgcgatatgggtaaggatgagtttttcgccgagctcttcgcgtatttcccgccgcagcgcctcttcaatccgttcccctggctccacgccgccgccggataaggcccattgcccgggaaaaaccccgcggtcggcggccattttgcaaagcagataatggccttcattctcgatcagcgggcaaacaatcgtcctttggcgcatgggttttctcctgcagagggatggggcggtatgctggtgaaatagtttgcgagccgcctcggtaaactgcaagcgaaatacagttcaggtcttgttgagtgctacgttaagcgaaaatgattgtatggagcaccgccatggaaagggcgacgaattccccccacgatgctgtatttaaacacctgctgtcgcatcgggcgacggccagggattttctggacattcaccttcccgcaccgctgcgcgcgttatgtaatctgaacacgctgcggctggagtccgggagctttatcgacgacgaactgcgggcgagtcattccgatatcctttactcgctgcaaacgcaggcgggggagggctatatctatctgttgatagagcaccaaagctcggcggaccgccatatggcatttcgcctgatgcgctatgcgatagccgcgatgcagcgtcatctggataaagggcatacgcagctgccgctggtgatcccgctgctgttttatcatggtcgcgtttctccctggccttacccgatgtgctggctggcaggctttgccgatccggacatcgcgcggcggatctatggtgaagattttcccttaattgatatcactagcaccccggacgatgaaatcatgcgccaccggcgcgtggcgatgctggagctgctgcagaagcatattcgccagcgggatttgatggacctgcatgagcagctggtcaggctcctggcgctgggatacactagccgcaggcagcttaagacgctgttgcactatttattacaggcaggaaacgccgccgatccggttgcttttttgcgccatcttgcgcaaaacgtcccccggcggccgcataaggagacgctaatgaatattgcccagtttctggaacaacgcggccatcagcaaggattaaagcaaggtcttgaacaaggtctacagcaaggtatcgaacaaggtatcgaaaaaggtatcgagcaaggtgagcagcagaccgcggagcgtatcgcccgggcgatgcttgctaacggactcgacctgtcgctggtggcgaaactgaccggcctcgccccggaatgtctggcccggctgcagcattaattattcccttatccactcgcgccgcgccgatcgtgcggcgccagctctctgttttcgtcaatgtgtcagcgttaatcataataaacatgaatattactggcgttgaataggctgttcgtggttctggcaacgctcgatgccgtaaaaatacgcaactggttacactcttgtgaaaattcatttcgccaggtcattgattcctgatgggtgcgcagtagaattttcaggttttttcgggacttctttgattttaattttctggatagagtaaataatgaaaaaaagcatttttatggcgctggcgggcgtgatgatggtttcttcggcggcccatgcgattagcgttaccggtgaagccggcgagcattacaccaaccttggcgtcggcttcggcaccgagtccaccggcctggccgtttcgggtaactggctgcacagcgataacgacggcgacgccgcgggtttaggcctgggactcaatattccgctggggccgttcctcgcgaccgtgggtggtaaaggtatttacaccaatccgaaacagggcgatgaaggttatgcggccgcggtcggcggcggcctgcagtggaaaatcggcgacagcttccgcctgtacggcgattattactactctccggattcgctctccagcggcattgatagctaccaggaagccaacgtcggcgccagctggaccattatgcgtccgcttagcatccaggccggctaccgttacctgaacctggcgggcaaagatggcaaccgcgataacaccatcgccgacggcccatacatcggcgccagcgccagcttctaatctcttccggcgcggcatcttcttgctgcgccagattttcctcctcgtcagcatcccgctttgcgttatagtatttctcacctggcaggcaaggagtgagcaatgttgaatgtggaaatgctgtccaccggcgatgaagtgttgcatggtcaaatcattgataccaatgcggcatggctggcggatttcttttttaatcagggtttaccgttaacgcgccgcaataccgttggcgacgatctcgatgcgctggtggcgattctgcgcgaacgcagcgaacaggcggatgtgctgatcgtcaacggcggcctcggcccaaccagcgacgacctgagcgcgctggccgccgccactgcgaaaggcgaggggcttattttgcatccggagtggctggaaaccatgacccgcttttttgccgagcgcggcaggccgatggcggaaagcaaccgtaagcaggcggaaatcccggccagcgccgagatgatcaacaacccggtcggtacggcctgtggctttgccatccagctcaaccgctgcctgatgtttttcactcccggggtcccctctgaatttaaggtgatggtcgagcaggaaattttaccgcgcctgcgccagcgctttacgctgccggacccgccggtatgcctgcgtatgaccacctttggccgctcggagagcgagctggcgcaaagtcttaatccgctgacgctgcctccgggcgtggtgatgggttaccgctcgtcgatgccgatcattgaactcaagctaaccggaccggccaaccagcgcgacgccatgctggccctgtggccggaggtgcgtaaggtggctggcgacagcctgattttcgaaggcacggaagggttaccggcgcagatcgcccgctgtctgcaggagcggcagctgagcctgacgctcagcgagcagtttaccagcggcctgctggcgctccagctgtcccgcgccggcgcgccgctgctggccagcgaagtcgttccggcgcaggaggagacgctggcgcaggcggcccgctgggcggccgagcggcgcataaaccattttgccggcctggctctggcggtgagcggtcaggaaaacgatcatcttaacgtggccctggccaccccggacggcaccttcgcactgcgggtgaagtttagcgccacccgccacagcctggcggtacgccaggaagtctgcgctatgatggcgttaaacatgctgcgtcgctggctgaatggccaaccgctggccagcgaacatggctggattaacgtggtggattccctctcgctgtaagtcattccccccggcgcaccgtatcctcggggcgccggtcgtccaacctgttgtactcttctgaaaaaattctgtgcgttaagtcgcaattttctgctgcgaacggtccagtatacgggaaaacgattgccccgcgatgtcgctcacactttaccgcccggacaatcgcaacactgattccagtattcaggattggagtccagtatgttggaatcaacgaaagtcccggcgctgacccgcgcgattgagatcctcaatttaattggccgcatcggcccctgcagcgcggcgacgataatagcggagctggggatcccgaaaagcacggtgtatctgctgctgggcgagctgaaaaagcagcgcttcatcagtatggataatcaggataactactgcctgtggaccaagctggtggagctggccgggcaggcgctgagcaaaatggacctgcgcgagctggcgcggccgcgcctcacccggctgatggatgagtgcggcctgctttgtcacctgggcattatcgatcagggcaacgcctactacattctgaaaattgagtctcccgccaccatcagcgtgcgctcgcatgagggtaagagcctgtcgctttaccgctccgggatcggcaaatgtttgctggcctggcagcccgccagcgttcaggcgtcgattatcgaagacctgcagtgggagcgggccacgccaacgaccatcaccgatgctcaacagctgcgggaagagctggggcggatccgcgcccggggctggagctttgataatggcgaggactatccggatgtgcgctgcgtggctgccccggtatttaacgccaataacgacctgaccgccgccatctcggtggtgggtacccgtctgcaaatcaatgaagacaatcgcgattacctggctggtaaggcgattgcctgcgcgaaagatatttcacgtctgctggggtggaaaagccccttcgaacaactcgcctcatcataaggagaacatcatgaccctaccgaaaattaaacacgtccgcgcctggttcatcggcggcgccacagcagagcagggcgccggcggcggcgattaccatgaccagggggctaaccactggattgacgatcatatcgccaccccgatgagcaaatataaacagtatgagcagtcccggcagtcgtttggcatcaacgtgctggggacgctgattgtggaagtggaagccgacaacggacagaccggctttgcggtgtcgacggccggggagatgggctgctttatcgtcgaaaaacatctcaaccgctttatcgaaggcaaatgcgtcagcgatatcaaactgatccatgaccagatgcttaacgccaccctttactacgcgggatccggcggcctggtgatgaataccatctcctgtgtcgacctggcgctgtgggacctgttcgggaaagtggttggcctgccggtctacaaactgttgggtggggcggtgcgcgacgaaatccagttctatgccaccggcgcacgtccggacctggcgcaggagatgggctttatcggcggcaaaatgcctacccactgggggccgcacgatggcgacgccgggatccgcaaagacgtcgccatggtggcggatatgcgcgaaaaatgcggcccggatttctggttaatgctggactgctggatgagccaggacgttaactatgccaccaaacttgcccatgcctgcgccccttataacctcaagtggatcgaagagtgcctgccgccgcagcagtatgaaggctatcgcgagctgacgcgccaggcgcctgccgggatgatggtgaccagcggcgagcaccacggcacgctgcagtccttccgcaccctgtcggaaaccggcatcgatattatgcagcccgacgtcggctggtgcggcggcttaaccaccctggtggagatcgcggccatcgccaaagcgcgcgggcagctggtagtgccccacggctcgtcggtttactcacatcatgcggtgatcaccttcaccaacacgccgttcagtgagtttctgatgaccagtccggactgcgccacgctgcgcccgcagttcgacccgatcctgctcggcgagccggtgccggagagagggcgcattcataaatcggtcctggataaacccggctttggcgtcgagctcaatcgcgactgcaacctgaagcgtccttatcaacactgattgcgtcgggccgcccggcggcccgcgcctgaggatattatgatgagcaacactctgctggagagcgtggtgaagaaaaaccgcgcccgcttaatcccctttatgctggcgttgtacgtgctggcgtttcttgaccgttctaatatcggtttcgccaaagagacctaccagctggataccggactcagcaatgaggcctacgcgctgggggccggtatcttctttgtggtctatgccttcctcggggtgccggccaatctgctgatgcgcaaatttggcgccaggcgatggatcggctgcaccacgctgctgtggggagtgctgtcggcggcgatggcgtgggcggatacggaagcgaaattcctgctggtacgtaccctgctgggcgcggcggaggcgggcttctttcccggaatgatctacctcacttcacagtggtttccccagcaaaaccgcgccagcattatggggctgttttatatgggcgcgccgctggccctgacgctgggatcgcctttatccggtgcgctgctggagatgcatggatttatgggccatcccggctggttctggatgtttgtcattgaaggcctgctcgccgtcgccgcgggagcgttcaccttcttctggctggacgattcgccgcagcatgcccgcttcctgagcgcagcggagaaacaggcgctgataagcgagctggcgcgcgaggaggagaaaaagattgcctcgcgcctgtccgatgcgctgcgtaacgggcgggtctggcagctggcgctgatttatctgaccattcaggtggcggtctatggtctgattttcttcctgcccacccaggttgctgcgctgctgggcaccaaagtcggcttcgttgcctcggtggtgacggccatcccgtgggtggcggcgctgtttggcacctggcttatccctcgctactccgatcgcaccggcgagcgacgcaatattgccgccctgacgctgctggcggcggcggtcgggattgcagtgtccggactggtggcgccggtgctggctatcatcgcgctgtgcgtggcggcggtcggggtgatcgccgtgcagccggtcttctggacgatgccgacgcagctgctgtccggcacggcgctggccgcagggattggctttgttaacctgtttggcgccatcggtggttttctggcgccgatcgtgcgcgtgcaggccgaaacgttgttcgccagcagcgccgccggactgttaaccctggccggcgtcgccattgtcggggtggtcattatcttttcattgagccttacccgcgcggtaccccagcgcggcagcgtacagcattgaataaaggaatcgctatgaacgcactgttatctaaccccttcaaacggggattattacgcggtgagacgcaaatcggcctgtggctgagctccacctcatcctacatggcggagatcgctgcgacgtcgggatacgactggctgctgatcgacggcgagcatgccccgaacaccattcaggatctttatcatcagctgcaggcgattgccccctatgccagccagccggtcattcgcccggtcgagggcaaccgcagcctgataaaacaggtgctggatattggcgccagaaccttgctggtgccgatggtcgataccgccgagcaggctcgggaggtggtctcagcgacccgttatccccccatcgggagccgcggcgttggcgccggcgtggcgagagcggcgcgctggggaagggtggagaattatatggcggaggcgaatgacgaactctgtctgctgattcaggtcgagagccgaaccgcgctggagaacctggacgctattctcgaggtggacggcattgacggggtgttcatcggtccggcggatctctccgcctcgctgggctacccggacgatgccggtcaccctgacgtgcagcgggtgatcgagcagagcatccggcgcattcgcgcggcggggaaagcggccggatttctggcggtcgacccggcgatggcggaaaaatgtcttgcctggggggccaactttgtcgccgtcggggtggataccatgctgtatacccaggcgctggaccgccggctggcgatgtttaaatctgccagcgcccagccgcaagagaaaacgagctattgacggcacaggctggcgctgggctcagacgagcgcctgcgccagcaccgtcagcggatgctcgcagcgtttgctggtggacatctcaatctgccatttgcaggtctcgcagtcggtgacgacgaggtcggccccgctctcctcaatctgacggaacagcggggcgccgatagcctgggataccgcgtaattctcagttttaaacccgtaggtgcctgcgatgccgcagcactgggaatccagcacctccagctgcaggccggggatcagccgcagcagctcgagggtatacagcgaccagcccatcttttccatatgacacggggtgtgatagaccaccttcagcggcagcgggcgcagcggtagcgtcctgccggcagccagctgtttccagatccagcgggtggcaagctcgacccgatcgcgaagatcgctgttatcgacatcgaggagatgggggtattcatcacgtagcgtaaaggcgcaggtcgaggaggtggcaatgatcggtagcgtgttttcccgcatcgcggcgacgttgctctgcgcctgcttacgcgccttgtcgaaaaaaccgttggcgatgagcggtacgccgcagcatttttcttttgataacaactgcaccccggtacccagtgcgttgacgacgcgaatcagatctttacccaactgtggatggttatagttgacgtagcagccatgaaagaaagccacctgttcgctgtactgcttctgacgggcggcgagctggcggtaagcgcggcggaaggtgccgaaaccatatttcggcagcgtacgccggtgatcgatgttgagcgtcgcgtcgagcagacggcgcaccggttttaagccggtggcggcgttgaccaggggggcaaagggggtggaaagggtacccatcaggtcggtatggctgaggatggcgtcgcgcagggtcggcttttgctggccgtactgtgcccgggcgcgttgaatgatatcgccaattttcacatccgacgggcaggcgacctcgcagcgcttgcagttaatgcagtacttcagcgcctcgtcgtacagcgcgccatccttcagacgcaggcgttcgccgtccggccccgcttgtttcgggccgggatagcgcggattgacccgacttaccgggcaggtggtggtacagaccgtgcacttaatgcagctttcaaaacgggtatcgttcatggccggcctccggcaagggcgtggatctgtctggcggcgtgcagcgcggtaacggcgcagacgccgccgccacagccgagctgaatggcatcgaacccgccgagcaatgagccgatggcgaacagattatggaacggctgcccgcccagcagggggcgcagcagggcatcggttttcacgccgaagcgctgccacggttgtgaggcgaagaaatcgcgctggtaccagctttcccgtggcagggtctggtgaaggtcgaggccgaggatcggctcgcgcacgctatcgcgagtggcgacaagaccgttgctgaaaaagctgccgctggccagcacggtaaagcgcggacgcagcgcaatatcgccgtgattgcgcgtccagaccgcctcgacggcgtcctgtcgatggctgattttcaccacctcatcgcctgcgagccaggcgccgccctcgcgaatgaactggcgttgcagctgagaatgcaaacgcatcccgggaaccgaaggcggcagcgtcggcagcagacgcagcgggcagggtagacgcgcctgcagccagtggtaaaggcgatcgtcggcgaggccaaaacaggcgggcatgatcagcaggtcatactgctgcgccagcggtagcagcgctgcatgcagggccggccacatattctcatcatccaggacgcgggcgatattggcggcgcgaaactcggtcgggttgtcacgcagcacatccagcagcggtaactcgatttccaccgccgcggcggtaactccgtgttgaccgagcgcggcggcggcgagatgcggctgaaaatcagcaaagccgctgatccccaccagacaggcgccctgcgacggcaggggcgcgacaggcacctcaaggggcgacagccatgccgggcgcaacgtccccagcggcgttacccgccggtgcggccggcgcgcatcgccctgcatcaccgcgccgcaggcggccagcagggcttcggtctgtgtcgcgtattcgagcaccgcctcggcgccgagccgggaataagggtgttcaggaagctgttcagcgagttgctgcagaccttgtgcgacgtcagtgacgtgatcgccgttgggcagcgccgagagcaggtctaacgacgcggaggaaaaatgcagcgcgctctgcccgcggctgatgatgacgctgcgcaggccgtgctgattcagggccagcccgcacagcaggccggcgagcccgccgccgataatcgcgcaatcaaacttcatcccggtgctcctgtggcaatccgcacaggccgaggtagacccagcgggtgaattcgctttcgcgcagcgcatcgccccaggcgatgggctgcacgcccttccagcgttcattgagaaattccgagagctgggttaacgactgcgcgggcgtggtgacgttaaagcgctgtagcaggccggcagcgcggcaggcgcagagttccccctgacaggtccccatgccaatccgggtgcggcggcgcaggtcgagcagggtgttgaccgccaggttttccaccgcgtatttcacttcaccggcagtgacggcttcacattcgcagaccaggctacggtgctggcggctgtcgccaagccaggacggggtgcgatcgccgtgacggtagacggccgagccgcgcagcggggtggggagggagataatcttttgcagggtactttccgttggctcctgtgaaccgggcagcggggcttcggccgtggtacagggggtggtgtttcccagcttacgacagacggcgtcggtggcccactcggccataaggcgataggtcatcagcttgccgccggtgatagtaatgaagccttccataccgtcacgctgggcatggtcgagcaggacgatgccgcggctgacgccgcgcccgctgggatcgttatcgctggccaccagcgggcggacgccggagtaggcgcggaggatccgggtgcggcccatgaccggcgccagcttttccccttcgcgcagcagggtatcgacctccgccgctgttacccggttgtcgtcaatttcgtcataaggaatatgcattgaggtagtgccgatcagcgagatggtatcgccgggcaccagaatatcggcgtcggccggcttacggcagcggttgatcaccaggttgttaatccgatgatcgaggatcagcagcgatcccttcgccgggaacatggtgatgcgcaggtcggcatattccgcaatacgctgcccccagatcccagcggcgttaaccaccatcccggcgtacagagtgcgggcctggtgaagttggcggtcgtatacctggacgccgcagacgcgatcgccccggcgcagcaggcctgttacttcgcagccggtaaggatctgcgcgccgtgttcgcgggcgtcgagcatattggccgcggtgaggcgaaacgggtcgatggtaccgtccgggacctgcaccgcgcccagcagcgtcgggttgacggcgggctcccggcgcagcgcttcctgcggcgagagcggcgtggcctctatgccagcctgctgacaggcgtcgataaaggtttgctgccatgccaggtcatcttcaggcagggtgataaacagcccattggtcggttcaatacagtggcgggcgatgcggcgcaggatgcggttctcactgatgcattcgcgggcggattcgttgtcggtcaccgcgtagcgggcgccgctgtgcagcagtccatgattccggccggtcgccccggtggcgatatcatggcgctcaatgagcagcgttcgtaatccgcgccgggcgcagtcgcgggcgataccggcgccggttgctccgccgccgatgataatgacctcgctatcaagacgtcccgtcatcttcagctcctctgctttcgttttacgccatttagccacaattagtaaggttattgtttgatttcgagcatattcgcgcgttatttgagcgtgttatgtgatttcgtgctcacattggaacgttttgtcatatttctgtaacaaattgtgcgatgtttcacagtatcaactctacgtattgcctaccatcgcgaccatatttgaagttggtgattaatctgggattttgtcgtgacgtcagtagaaaacagcaagggccacggaggctgatatgttaagtatttttaaacccgccgcgcataaagcgcgtttgccagcagcggagattgacccgctatatcgccgattacgctggcagatttttattggcatcttttttggttatgccgcctactatttggttcgtaagaactttgccctggcgatgccttatcttatcgagcaggggttctctcgtggcgacctcggcttcgccctttccggtatctccatcgcctatggattttcgaaattcatcatgggatcggtctctgaccgctcgaatccgcgcattttcctgccggctggcttgatcctcgccgcgctggtgatgctggtgatgggcttcgtgccgtgggcgacgtccagcatcatgataatgttcgtgctgctgttcctctgcggctggttccaggggatgggctggccgccgtgcggccggaccatggtgcactggtggtcgcagaaagagcgcggcgggattgtctcggtgtggaactgcgcgcataacgtcggcggcggcattccgccgctgctgttcctgttagggatggcgtggtttaacgactggcacgcggcgctgtatatgccggcattcggcgccattctgctggcgattttcgccttcgcaatgatgcgcgacaccccgcagtcctgcggtctgccgccgattgaagaatataaaaacgactacccggacgattacagcgaaaagcacgaagaagagctgacggcgaagcagatctttatgcagtacattctgccgaacaagctgctgtggtacatcgctatcgctaacgtcttcgtttatctgctgcgctacggcattctcgactggtcgccgacctacctgaaagaagttaaacacttcgcgctggataaatcctcctgggcctatttcctgtacgagtacgcggggatcccgggcacgctgctgtgcggttggatgtcggacaaagtgtttaaaggcaaccgcggcgccaccggcgtgttctttatgaccctggtgaccatcgccactgtcgtttactggctgaacccgccgggtaatccgggcgtcgatatggcctgtatgatcatcattggcttcctgatctacggcccggtgatgctgattggtctgcatgccctcgagctggcgccgaaaaaagccgccgggaccgccgcgggcttcaccggcctgttcggctatcttggcggttccgtggccgcgagcgctatcgtcggctacaccgtcgatttcttcggctgggacggcggctttatggtgatgatcggcggcagcgtgctggcggttatcctgctggttatcgtgatgctcggtgaacgtcgccatcaccaacagctgaaacaagcctaaggagcggcgatgaaaatgaaacttaccgcgctgatgagcggaatgattctgtccagttcggcgctgtgcttcagcgcgacagcggctgataaaatggtcatcgcccaccgcggcgccagcgggtatctgccggaacataccctgccggcgaaagcgatggcttacgctcagggggcggattaccttgagcaagacctggtgatgaccaaagacgaccggctggtggtgttacacgaccactatctcgatcgggtgactgacgttgcgcagcgtttcccgcagcgggcgcgtaaagatggccgttactacgccatcgactttaccctggacgagattaagtcgctgaagttcaccgaaggttttgagccgaaaaatggtaagaacgtgcaaacctatcccgggcgattcccgatgggcaaatccgatttccgtattcatacctttgaagaggagattgagtttgtccaggggctgaaccattcaaccggcaaaaacatcggtatctacccggaaatcaaagcaccgtggttccaccaccaggaaggcaaagatattgccgccagcacattgaaggtgctgaaggaatatggctataccagcaagcacgataaggtttatctgcagtgctttgacgccaacgagctcaaacgcattaaaaatgagctggagccgaagatggggatggatctcaatctggtgcagctcatcgcctataccgactggaatgaaacccagcagaaacaggccgatggtaagtgggtgaactacagctatgactggatgttcaagccaggggcgatggcgcagattgcgcagtacgcggacggcatcggcccggattaccatatgctggtagcggaaggctcgaagccgggggcggtgaagctgacggcgatggtgaaagaggcgcatgccagccatctgcaggtgcatccgtacaccgtgcgcgcggatcagttgccggagtacgcgactaacgttaatcagctctatgacgtgctgtataaccaggcgggcgtcgacggcttatttaccgatttcccggataaagcggtgcagttcctggacgcgaaacagtaaaaagccggatggcggctacgccttacccggcgtacgaactgcggttttgttgacactgttctcggcgtgcaacgatttcgacccgggaataacgtttgttctatgttatttcctggaagattgcgctcccgatatttcttctgcgttatgcctttcatagcgcagggagcgcacagggggaggccagtcgccgcctccccctgtacccccgggctccggccagcaaaatcgccgctgcgcggtcccttcgacttatccctgcaggcttcgggtcgggccgaggtagcgtccatgcaaaacacggccctcagcccgcatccatgcgggctgccccggccttccgggaacgtctcagcgattttgaggccgtcaacaccggcagtttcagcagcccagggcggcagtgcgtaaacggccggtcctggaacagtaggtcaggtaagcgtagcgccacctgacaagactacatctcgatctcaatatcgcctttcgcccggcagcagcagggcaaaatttctcccggctggataaaggccagcggctcggtcagccagtcaacctggccggagaccaggcgagtgcggcaggagccgcagtagccttcgcggcactgatattcgacgtcgatattatgcgactccagcgccgccagcagggaagggtgttcatcctgacactcaaggcgagtgtcagagattttcaggaagatccgcttcattacagctggaagttactcagatcgtcggcatcgacttcagaatcgatctggccgacgagataagaactgacttccacttcctgcggcgccacctgaacgttgtcggagaccagccaggtgttgatccatgggatcgggttggagcgggtctggaacggcagatcgaggcccaccgcctgcatgcggatattggtgatgtactcgacgtactggcagagaatatctttattcaggccgatcatcgagccgtcgcggaacaggtagtccgcccactctttctcctgctgcgccgccagcacgaacaggtcatagcactcctgtttgcactcttcggcgatttccgccatttccggatcgtcgctgccggagcgcagcaggttcagcatatgctgggtgccggtcaggtgcagcgcttcatcgcgggcgatcaggcggataattttggcgttgccttccatcagtttgcgttcggcaaaggcgaaggagcaggcgaagctgacgtagaagcggatcgcttccagggcattaacgctcatcaggcacagatagagtttctttttcagctcgcgcagattcacggtcacggttttgccgttgacggtgtgggtgccttcgcccagcagatgccagtagctggtcatctcgatcagcgaatcgtaatagtgagagatgccttccgcacgtttctggatctgctcgttggtgacgatgtcgtcgaacacggtcgccgggtcgttgacgatgttgcggatgatgtgagtgtacgaacgcgagtgaatggtctcggagaaggcccaggtttctacccaagtctccagctccgggatggagatcagcggcagcaacgccacattcgggctacggccctggatggagtcgagcagcgtctggtacttcaggttgctgatgaaaatatgtttttcatgttccggcagcgcctggtagtcgatgcgatcgcgggaaacgtcaacctcttccgggcgccagaagaaggagagctgcttttcaatcagcttttcaaagatgtcgtatttttgctgatcgtagcgggccacgttaaccggctggccaaaaaacataggttccagcagctgatcgtttttcgtctgtgaaaaagtggtgtatgccattgaagtgagtcctgttgaactgtattgcccggcgggaatgggttggccgggcctacacaaacgtaggccgggtaagcgtagcgttacccggcaaaagtaccttagatcttacaagcgccgctttcgcagccgtcgtcctggatggacggggccaggtcatcctgagcgtcttcagcgccatcacgggtgttgtgatagtacagcgttttgacgccgaatttataggcgttgagcaggtctttgagcaactgctgcatcggcacttttccggacgggaagcgcgtcggatcgtagttagtgttggcagagatcgactggtcgataaacttctgcatgatacccaccagctgcagataaccgtcgttgttcggcatctcccacagcagctcgtaggcgttctgcaggttttcgtaatccggcaccacctggcgcaggataccgtccttggacgctttgatactcacgtggccgcgcggcggctcaatgccgttggtggcgttggagatctgcgacgaggtctcggacggcatcagcgcggagagcgtggagttgcgcaggccgtgagttttaatggactcgcgcaatgcttcccagtcgtagtgcaggggttcgctgacgatgccgtccagatctttcttataggtatcgatcggcaggatgccctgcgcataggtggtttcgttgaaccacgggcaggcgccttgctcgatagccagctcgttagaggccttcagcagatagtactgaatcgcttcgaacgttttgtgcgtcaggttgttggcgctgccgtcggagtagcgtttgccatgcttcgccagatagtaagcgaagttgatcacgccgatacccagcgtacgacgccccatcgcaccgcgtttagccgccgggatggggtaatcctgatagtcgagcagcgcatccagagcacgcaccgccagcactgccagctcttccagctcgtcgaggctgtcgatagccccgaggttgaaggccgacagggtgcacagcgcgatttcgccgttttcgtcgttgacatcttccagcggtttggtcggcagagcaatctccaggcacaggttagactgacgcaccggggcgactaccggatcgaacgggctgtgggtgttgcagtggtcgacgttctggatatagatgcggccggtagaggcgcgctcctgcatcatcagcgagaacagctcaacggctttaatacgctgcttacgaatggtgtcgtcctgctcgtactgggtgtacaggcgctcaaactcgtcctgatcggcgaagaaggcgtcatacaggcccgggacgtcggaagggctgaacagggtaatatcgccgcctttcagcagacgggtgtacatcagcttgttgatctgtaccccgtagtccatgtgacgaacgcggttggcgtcggtaccacggttgtttttcagcaccagcaggctttccacttccagatgccacattgggtagaagagggttgccgcgccgccgcgcacgccgccctgcgagcaggatttcaccgcggtctggaaatgcttgtagaatggaatgcagccggtgtggaaggcttcgccgccgcggatcgggctgcccagcgcgcgaatgcgcccggcgttgatgccgatgccggcgcgctgggaaacgtatttcacaatcgcgctggaggtggcgttgatggaatccaggctgtcgccgcactcgatcagcacgcaggagctgaactgacgggttggggtacgcacgccggacatgatcggcgtcggcagcgagattttaaaggtggacaccgcgtcgtagaaacgcttgatatagtccagacgcgtttcgcgcggatagttcgagaacaggcaagcggcgaccagaatatagaggaactgcgcgctctcataaatttcgccggtgacgcggttttgtaccagatacttgccttccagctgcttaacggctgcgtaggagaagttcatgtcgcgccagtggtcgaggaaaccgtccatctgctggaactcttcttccgtgtagtcttccagcagatgatgatcgtatttacctttctcgaccatcttcaccacgtgatcgtagagcgccggcggctcaaactgaccgaaggcttttttacgcaaatggaaaatcgccagacgcgcggcgaggtactggtaatccggtgcgtcgcgggagatcagatccgcagcggctttaataatggtttcgtggatgtccgcggttttgatgccgtcatagaactggatatgggagcgcagctctacctgggaaatcgaaacgttattcagtccttctgccgcccaatccagtacgcgatggattttgtcgagattgatgcgctcggtggtcccgtcgcgctttgtcaccagcagactctgattcatgtggattttacctgtccgtgaaagaaaatatcccccgtttatccacagaaggccgttgtgactaactctgtggataaatactatatgtagggggttgtcgataaaagaaacgctatatggtgagtattttagtaaggaatcttttgagtacaagggttgattttgacgttaaattgaggttgcggaagggtaataatccgcaagtccacgtcgcataaggcctggagaagaagtcaataaaacagaaaaaaaaatgaaaatttgatcgagtgctgatttcttcatcggaagaaataatcacgcggcttgatgccgcgcaatcatcataagcggaggtgctgacctcagtcctgtttggcggttgtatgcaacatatagttaacatcaacccccggcgctaacttgaaggtattggtcagcggattgtaatgcagaccgatgatatgctgctctttcagagttgtctgatctacccagcccagcagctcggccggcttgataaacttcttcacatcatgagtgcctttgggcaccatcttcatgacatattccgccccgactaccgccatcagccaggccttgccgttgcggttgatggtggagaagaagacctggccgccgggcttcactaaccgcgcgcaggcgtgcaccaccgactgcgggtcggggacgtgctccagcatctccatgcaggtcacaacgtcatactgctgcgggtgcttcgcggcatgttcctcaactgtttcctgaacatagtctacctgaataccgctctccagggcgtgcagcctggcgacctgcagcggttcggcccccatgtccagcccggtgaccgtcgcgccttcgcgcgccatgctctcggcgaggatgccgccgccgcagccgacatcgaggacttttttaccgaacaggccgccggagcgttcggcaatatagcccagccgcagcgggttgatgcggtggagcggtttgaactcgccctccagatcccaccagcgcgaggcgacggcttcgaatttggcgatttcagcatgatcgacattaggggctaccgacgttttttcggcattcatgggcgcttttactccttttctgttcagacctgcgagtatatcagcagcgcgccatgaataaaccgtattgctttacctctattagcgcggctgtgttataatttgcgacctttgaatccgggatacagtagagggatagcggttagatgagcgaccttgcgagagaaattacaccggtcaacattgaggaagagcttaagaactcttatctggattatgcgatgtcggtcattgttggccgtgcgctgccggatgtccgagatggcctgaagccggtacaccgtcgcgtactttacgccatgaacgtattgggcaatgactggaacaaagcctataaaaaatcagcccgtgtcgttggtgacgtaatcggtaaataccacccgcacggcgactccgcggtatacgacaccatcgtgcgtatggcgcagccgttctcgctgcgttacatgctggtggacggccagggtaactttggttccatcgacggcgactccgccgcggcgatgcgttataccgaaattcgtctggcgaaaatcgctcatgagctgatggccgatcttgaaaaagagacggtcgatttcgtcgacaactatgacggtacggagcgtattccggacgtcatgccgaccaaaattcctaacctgctggtgaacggcgcctccgggatcgccgtagggatggccaccaacataccgccgcataacctgacggaagtgattaacggctgtctggcgtatgttgacgatgaagacatcagcattgaagggctgatggcgcatattcctggccctgatttcccgaccgccgccattatcaatggccgtcgcggcatcgaagaggcctatcgcaccggtcgcggtaaagtgtacattcgcgcgcgcgcggaagtggaagtggacgcgaaatccggccgcgaaaccatcatcgtgcacgaaattccgtatcaggtgaacaaagcgcgcctgatcgagaaaatcgccgagctggtcaaagaaaaacgcgtggaaggcatcagcgcgctgcgtgacgagtctgataaagacgggatgcgcatcgtgattgaagtgaagcgcgatgcggtaggggaagtggtgcttaacaacctctattcccagacccagctgcaggtctccttcggcatcaacatggtagctctgcaccatggtcagccgaagatcatgaacctgaaggacatcatcgccgcgtttgtacgccaccgccgtgaagtggtgacccgtcgtacgattttcgaattgcgcaaagcgcgcgaccgggcgcatatcctcgaagcgctggccgttgcgctggccaacatcgacccgattatcgaactgatccgtcgcgcgccgaccccggcagaagcgaaaacggcgctggttgcccaggcgtgggatcttggtaacgtcgcggcgatgctggagcgcgccggggatgacgccgcgcgtccggaatggctggagccagagttcggcgtacgcgacggtaaatactatctgaccgagcagcaggctcaggcgattctggatctgcgtctgcagaaactgaccggccttgagcatgaaaaactgctcgacgaatataaagagctgctggagcagatcgcagagctgctgcacattctcggcagcgccgaccgtctgatggaagtgattcgcgaagagctggagctgatccgcgaccagttcggcgacgaacgtcgtaccgaaatcaccgccaacagcgctgatattaacatcgaagatctgatcaaccaggaagatgtggtggtcaccctgtcgcatcaggggtatgtgaaatatcagccgctgaccgactacgaagcacagcgtcgtggcggtaaaggcaaatcggcagcgcgcattaaagaagaagactttatcgaccgcctgctggtggctaacacccatgacaccatcctctgcttctcaagccgcggccgtctgtactggatgaaggtctaccagctgccggaagccagccgcggcgcgcgcggtcggccgatcgtcaacctgctgccgctggaagccgatgagcgcatcaccgccatcctgccggtccgcgagtacgaagagggcgtcaacgtctttatggcgaccgccagcggtaccgtgaagaaaaccgcgctgaccgagttcagccgtccgcgttccgccggtatcatcgcggtcaacctgaacgaaggcgatgagctgatcggcgtcgatctgacctctggtcaggatgaagtgatgctgttctccgcggccggtaaggttgtacgcttcaaggaagacgccgttcgcgccatgggccgtaccgccaccggcgtacgcggtattaagcttgcggaaaacgacagcgtcgtctcgctgattattccacgcggcgaaggcgcgatcctgacggtgacgcaaaacggttacggtaaacgtaccgcggcggcggagtatccgaccaagtcgcgtgccacccagggcgttatttcgatcaaagtcaccgagcgtaacggttccgtggtcggcgccgtgcaggtggatgactgcgatcagatcatgatgatcaccgacgccgggacgctggtgcgtacccgcgtttccgaagtgagcatcgtgggccgtaacacccagggcgtgatcctcattcgcaccgcggaagatgaaaacgtggtaggtctgcagcgcgtggctgagccggtggatgatgaagagctggatgccatcgacggtagcgcggcagaaggcgatgacgatatcgccccggaagcggataccgatgacgacatcgccgaagacgaagaataatcgtccgaggtaaatgttctggaagggccgggtattttcccggccctttttgcattaacattgcggcaaagccggtttaccgctaccttaaccgcattctgttgagtccctgacggccgagcatcgccacattgaaatatcttgcctcttttcatacaaccctgaaggtttcacgttatctgttcagagcgctggcggtattgctgtggctgcttattgcgtttgtctctgtgttttatatcgtcaacgcgctgcacgagcgggaagccgaaatccatcaggagcttaatctcaacgccgatcaggcccagcgctatatccagcgtaccgcggatgtaatgaaagagctgaagtatgtcgccggtaatcgcttgtcggcaggggacgcggtagcgcaagggcaaaacggcgatatggcggtgcccaactttgaacccctgtaccccgattccgactgcagcgcgatgagcgccacctggcgtaattcgctgcagtcgctggcatggtttatgcgctactggcgggataattttactgccgcctacgaccttaaccgcatctttctcatcggcagcgataacctctgcatggccaactttggcctgcgggacgtgccgattgagcgcgatcaggcgctgaaagtcctgcatcagcgcatagagcaatatcgcaacgcgccgcaaaatgagcgcggcaacaacctgttctggataagccagggcgttcgccccggggtgggctatttttacgccctgacgccggtctatatggccaatcgcctgcaggcgatgctgggcgtggagcagaccatccgcatggaaagcttctttacgccgggcagcctgccgatgagtgtgacgatctttgacgataacgggcagccgctgatttcgctggccggtgcggaaggtaaaatccagagcgaagcgaagtggatgcaggagcggatgtggtttggctacagttcgggtttccgcgagctggtgctgaaaaaaagcctctcgccgtcctccctgagcatcgtctattccgtctcggtagatcaggtgctggagcggatccgtatgctgatcatcaatgctatcgttcttaatatcctcagcggcgcgatgctgttcgcgctggcgcggatgtatgagcggcgcatttttatccccgcggagaatgacgcccagcgcctggaagagcacgagcagttcaaccgcaaaattgtggcttctgccccggtagggatctgtattctgcgcactgccgacgggaccaatattctcagtaatgaactggcgcacaactacctgaacatgctgacccacgaggaccgccagcggctgacgcagatcatctgcggccagcaggtcaattttgtcgacgtgctgaccagcaaccataccaacctgcagattagctttgttcattcacgctatcgcaatgaaaacgtcgccatttgcgtgctggtggacgtttccgcccgcgtgaaaatggaggagtcgctgcaggagatggcccaggcggcggagcaggccagccagtcgaaatcgatgttcctggcgaccgttagccatgagctgcgtaccccgctgtatggcatcatcggtaacctcgatctgctgcagaccaaagcgttgccgaaaggcgtcgatcgccttgtgacggcgatgaacaactcctccagcctgctgctgaaaatcatcagcgatattcttgatttctcgaaaatcgagtccgagcagttgaagatcgagccgcgggagttctctccgcgcgaagtcatgaaccatatctccgctaactatctgccgttggtggtgcgcaagcagctgggcctgtactgctttatcgagccggacgttccggaacaaatgtccggcgacccgatgcgcctgcagcaggtgatctcaaatctgctcagcaatgcgataaagttcaccgataccggctgtattgtcctgcacgtccagtgcgcgggggattatctgcagattagcgttcgcgacaccggagaggggatcccggcgaaagaggtattgcgcctcttcgatcctttcttccaggtggggaccggcgtgcagcgcaattttcagggcaccggccttggcctggcgatctgtgaaaaactgatcagcatgatggatggcgatattgctgtcgaaaccgagccggggatgggtagccgctttaccatccgtattcctctgtatggcgtgcagaatacctcaccggtgagcagagacggtttcgctggcaagacctgctggctggcgattcataacacttcgctggcgatgttcgtcacctcgctgctcagctaccacggcctgacggtccgccgccatgccggcgaaacgccggacgccgaggatgtcttactcactgacgatgaggcgctgagcggatggcagggaagggccatggtcatcttctgtcgccgtcatatcggtattccgcaggagcggtccgccggcgaatggctgcacagcgtgacgactccccacgaactgctgccgctgctggggcgtattttccatgttgcgctcgccagtgcggaaaatagcccggcgctgatggccccggaggcgcaggccggcaataacgacgacatgatgatcctcgtggtcgacgatcacccgatcaaccgccgcctgctggcggatcagctgggttcgctcggctaccagtgcgtgaccgcgaacgacgggatcgacgcgctcaacgtcctcagcaagcagcacatcgatatcgtgctcagcgacgtcaacatgcctaatatggatggctatcgcctgacgcagcgcattcgtcagcttggcctgacgctgccggtgattggcgtaacggccaatgccctggcggaagagaagcagcgctgtctggaatcggggatggacagttgtctgtccaagccggtcaccctcgacgtactgaagcaaacgctgacggtatatgcggcgcgggtgcgtaaagggcgggaataatggggagctccgtctcgccggggcgagacggagagggcgaagagattactctttgtccgtcgcgctcagcgagacggaagagaggtagttcagcaaggcgatgtcgttttcgacgcccagcttcatcatcgccgatttcttctggctgctgatggttttaatgctgcgattaagctttttggcgatctcggttaccaggaaaccttcggcgaacaggcgcagtacttcgctctctttcggcgacaggcgtttatcgccatagccgctggcgctgattttttccagcaggcgagagacgctttccggggtgaattttttccctttctgcagcgcggccagcgcttttggcaggtcggtcggcgccccctgcttgaggacgatcccttcgatatccagatccagcaccgcgctgaggatcgccggattgttgttcatggtcagaacaatgatcgacagatccgggaagtggcgcttgatgtatttaatcagcgtgatcccgtcgccgtatttgtcaccgggcatggacagatcggtgatcagcacatgggcgtccagcttcggaagattgttgataagggccgtggagtcttcaaactcgccaacgacgttcacccactcaatttgctcaagtgacttacgaataccgaacagtacgatcggatggtcatcggcaataattacgttcatagtgttcatgtataaggctaccttctacagcaagctcttgacgtaagcgtcaatgtcgctgatatatttttctatgccttgcgcatccttttcgcgaatcagatgctcaagcgtttcacataactgcttgccgggtatcagattaagcatagcaaatgcccctttgaggcggtgggcggtttgcgccagagcagcaaaatcgcccgcttcgatttcagtatacaatctctgaacatcatccggtaccgtatcggcaaacagtgcgtaatagccgctggcatggagttcggcgttactctcgtttcctgaggtgacgggctgaaccgcctcctccgccagctgctgctcaataagctgcaggatagcctcctgcatcgccgtgctaatattaaagttgacccgcagttggcccgggccgatcttgcgtatcccgacctcatcatcgcttaaaagcaagcctgaagcagtaagattagacggattatccgttaaataaagatcaaaggcttgactggtcgcccgatcgtccggtgtgatgcaggacgctccccagctctccagctggcgagtgacaatccgccgcacttcgctggaagtcacatccagcaggacgataacgtcatccagcaaatgctctcccgcctctggcgcctcttcgctggccggcattttcagatgcagggtatagcgcgtccccagcgactcccgggctttaatggtcaattgcccgcccagcttgcgcgtcatgcggtcgcatagccagaaggtaagggcgtttgctttgccgtacaggtcgctctgggtctcgttgagatacgggaagtgcatattgtcgatctcgtttgccgagacgccgttgccggtatccagaatgcggaaggtcaggcgatcgctggccgactcatcctgacagacgtcgagggtgatcttgccgataggcgtggtggtcactgaatactggattaacagcaccagcgtgcgccgcagagcttcacggtcgccatagcgctgctcgccggccgggagcgcattgttgatgagcagctgcagacccttgcgtttcatcgccggcagcacttccggcacgacgtcgtcaataagctcctgcaccgagaacaacgtctggttggttttccaggcatcgctttccagcagattggcgagctgaatgtcatcgatgagtttgaccagctcatcggcatgctgggccagcgtccggttctctgtactactgagcgccgctgcctctgccgccagcgtcagcgcgggctgcttcagggcgctgccgatgtgctgcataaaggcggcccgtccctgctggtttttctcatacaagcgctgggcctgcttgagctttttattgaccagcacttcgcggtcctgatcacggatgatcaggatctgggtgcgcggcgctacctggctgcgatactggcggatttcatactgctcattattgacggtggcctgaattaccccctgatgctggtccgccatattggtgatgttctgcagattcaggtgcggaagcagatggtcggcaattggattgctgataaccgttcggttggcttcctgatcgtgaacgagcagccccagcggcagcagagaaacaatctcttcgttaatggcgcgcagcagacgcagttcgctgttggcggcggaggggagcccggcgccagacgaatggctgcgtcctttatagtggcgaaaggtggtaaaaccaaacagcgccagcgccagcagaccaatgttgagcagcagcggcagaagaatgttctgcatggactccagcagcatggtgctcattggtaccgtccacagcaactgcataccggtggtgctgatatcggtggcgatgtcaatctgcatgccgttaaaggtgatcccgatatgatcggcgctctctttatccggcgtggtggcgagattttgcgacgggtcaggctcgatacggaagctgtcgatggtcatgcccggcgggatcagatcgttaatcggcaggtcgaaggcgaccaccgtggcaaggtgtccgggctggttgaaggtggtgcgtaacgtaaaatagtgcgcgttctgccaggcgagatggcgcaacggcgagaacgtctcgcgctcatcaagggtattagcctgcagcagcatttccgcgcgccgcgactccacgacgctgctgatcgttgactctttgaagctcgaagagaggtccttcaacggcagggtggagaccaggatcagactattgtccaggccgttgagatagtacatcgaccacggaatggtctccgcgccccacaaaatatcgagataatcggacattttctgcgtcatttcgagggtggagctgtcatgggagccaaagatcagggcttcggttttacgccggggtttctccaggtagtaaacgtcctgttttaaacgcgtctcctgcagaccgccgcttgcggtgttgactgaggtggcggcgatattgtcgtagatctgccaggtggcatagcgccaggcgtcaatgcgctggtgcagagcgtgggagacatcaaccacctgatagcttttctccttcagccaggcattgacggcgctttggatcatcacccccattgtcgccagcaggacaataaccatcaaaatgaagaagcggctgatgttgccggggatcagggagaattttttcggggtcatcttgtggctgaacgactcatcattgtttgtaaacaggatgtagcgccagagtaactggcaacaaagcagatgctgctggcagtataaaggctaatggcgtaaatccatactacagattggcgcctgcggtgcgatgccgcccaggaattatcttagaaacgaagcgtaaatgaaaccgcgccgggaaggttaaccggcgacgatattgacggaaacaaaagggaagaatcgcacgaaataacaagacattggcagaatatgccccactgatggcctaattgattgattaatagtcgttagggaatcattagccgtagcacagataaattaaagttgtgtaaagaagggtaaaaaaaaccggatgcgaggcatccggttgaaataggggtaaacagacattcagaactgaatgacggtaataaataaagttaatgatgatagcgactcttattttagccaccaatgatcattttgttttaccattcagtgctatagatatgttgttgtctatcgctttgattataaaaggttaaatattttttttgatgattagtgcgtatttccctgaccattttgcggtgaaaaaagttccgctgaatttacaaattgaaacatcttgtgggaactttgaaacatcttagaagttttagtatcatattcttgttggattattctgcattttgcagcacaatgaaatagccgactgattagaagggtaatcagtaagcagtggcataataaaaggcatataacaaacagagggttaataacatgaaagttaaagtactgtccctcctggtaccggctctgctggtagcaggcgcagcaaatgcggctgaaatttataacaaagacggcaacaaattagacctgtacggtaaaattgacggtctgcactacttctctgacgacaagagcgtcgacggcgaccagacctacatgcgtgtaggcgtgaaaggcgaaacccagatcaacgaccagctgaccggttacggccagtgggaatacaacgttcaggcgaacaacactgaaagctccagcgatcaggcatggactcgtctggcattcgcaggcctgaaatttggcgacgcgggctctttcgactacggtcgtaactacggcgtagtatacgacgtaacgtcctggaccgacgttctgccggaattcggcggcgacacctacggttctgacaacttcctgcagtcccgtgctaacggcgttgcaacctaccgtaactctgatttcttcggtctggttgacggcctgaactttgctctgcagtatcagggtaaaaacggcagcgtcagcggcgaaggtacttctccgaccaacaacggtcgtggcgctctgaaacagaacggtgacggcttcggtacctctctgacctatgacatctatgatggcatcagcgctggtttcgcgtactcgcactccaaacgtaacggcgatcagaatcgtttggataaaggccgtggcgacaacgctgaaacctacaccggtggtctgaaatacgacgccaacaacatttacctggcgactcagtacacccagacctacaacgcaactcgtttcagcggcaacggagaatctgattctattagcggttttgctaacaaagcacagaacttcgaagtggttgctcagtaccagttcgacttcggtctgcgtccgtccgtggcttacctgcagtctaaaggtaaggacatcgaaggttacggcgaccaggacctgctgaaatatgttgacgttggcgcgacctactacttcaacaaaaacatgtccacctatgttgactacaaaatcaacctgctggacgaaaacgatttcactcgtcgcgctggtatctctaccgacgacgtggttgcactgggcctggtttaccagttctaagttgcaagctgcataacaaaaaggcgcctctggcgcctttttttatgtccggtttaacctcgctggtatactcttgtcgccctggtaagaggagcctcgattaatggatatgactttctttcgcgccgcgctgctgggcgcctgcgttctgctctctggctgcgattcagctaccactcctgcgacccccaccgcgacggccaccgtgctggatggcaaaacgatgggcaccttctggcgggtcagcgtcattggcgtggatgaggcaaaggcccaggcgttgcgcgccaaggttcaggcccagctggacgccgacgatcgcctgctgtcgacctggaaaaacgactccgcgctgatgcgcttcaatcatgccgccactaccgaaccatggccggtgagcgaagcgatggcggatatcgtcaccctgtcgctgcggattggcgccaaaacgcacggcgcgatggatattaccgtggggccgctggtcaacctgtggggctttggcccggataaacagccggtcaccaccccggatgccgaggcgatagccgcggcgaaggcgcgcaccggcctgcagcatctgcaggttattaatcagagcggcaggcagttcctgcaaaaagatattcccgatctgtttgtcgacctctccaccgtgggggaaggctatgccgccgaccacctcgcgcggttgatggagcaggaggggatctcccgctatctggtgtcggtgggcggagcgctggtcagccgcgggatgaacggcgaaggcaagccctggcgggtagcgatccagaaaccgaccgaccgcgaaaacgccgttcaggcgattgtcgacatcaatggtcacggcatcagcacctccggcagctatcgcaactactatgaactcgatggcaaacgcatctcgcacgttatcgatccgcagaccgggcagccgataacccataagctggtctccgtgaccgtcattgcgccaacggcgctggaggcggacggctgggataccggactgatggtgctggggccggaaaaagcgcagcaggtggtgcgcgaggaggggctggcggtctacatgatcgttaaagaaggagagggttttaaaacctggatgtcgccgcagttccgcactttccttgtcggcgagaaaaattaaaaagcaagattgcgggttttttactgcgggctttaccacagactgagggtacacttacagctggagacccgtcatgaaaccgatagttgccgataccgatgatcgccgctggcaggcggtctgcgaacgtgatacccgggccgatggtcagttcgtctttgcggtactgaccaccggcatctgctgtcgtccctcctgccgctcgcggcgcgcgcggcgagaaaacgtacgcttttttgccgacgtcgccgccgccgtggcggcgggattccgcccctgcaaacgctgccaaccggataaagactacccgcagcagcaaagggtcgacaaagtggcgcaggcctgtcggctgctggagcaggacgcgcccctgaccctcgaggcgctggcaggccagctggcgatgagcccgtttcatttccaccgtttatttaaatccgtcaccggcatgacccctaaagcctggcaacaagcgtggcgggcgcagcgcctgcgggaagcgctggagcaggggataccggtgacccgcgccgcgctggcggcaggttttcccgacagcagcagctattatcgccaggccgacgcagcgttagggatgaccgccagccagtttcgccgcggcggcgccgccaccgtggtaacctggaccacgggcgactgcgcgctgggtcgttgcctggtggcgcagagcgagcgcggcgtctgcgcggtgctgccgggtgataacgatgcggcattgctcgacgacctgcgccggcgctttcccaatgccgagctgcgtgaaggcgaccctgatttttgtcagcagatggccgagattttcgcccacctcgacgacagccggcggccggtatcgctgccgctggatctgcagggcaccgcgtttcagctgcaggtctggcaggcgctgcggcagatcccggcgggtgagacccgcagctaccgccaggtggcagagcatattggccagccgcgggcggtaagagccgtggccggcgcctgcgcggcgaattcgctggcggtgattgttccctgccaccgggtggtgcgtgaagatggcgccctgtccggttatcgctggggaacggcgcgaaaagcgcagctgctggcgcgcgaggcccaacatgaggaggagtaatgctcgatctgtttagcgataccccaccgtggcaggagccgctggcccccggcgcggtggtgctgcggcgatttgcccgcgaacgcgccccggcgctgctgcaggcgatagccgacgtcgccagtcagtcgccgtttcgccagatggtcacgccgggcgggtacaccatgtcggtcgccatgaccaactgcggcgcgctgggctggactaccgatcgccacggctatttgtacgccccggtcgacccggtaaccgatcaaacctggccgccgatgcctgccgtatttcatgaactggcgctggcggcggccgccgccggcggctatccggagttttctcccgacgcctgtttgattaaccgctattgtcctggcgcaaaactgtcgttgcatcaggataaagatgaacaggatctgcgggcgccgattgtctcggtctcgctgggcttgccggccatctttcagtttggcggcttgcaacgcagcgacccgctgcagcggctgctgctggagcatggcgatgtggtggtctggggcggcgagtcgcgcctgttttatcatggcattcagccgctgaaagcggggcatcatccggaaacgggcgattgtcgttacaatctcaccttccgacaggcgggcggtcgccagtattaaaataagaattattcttgatgtcatcggcgagccgtttaaactgctggctgttttgcttttgcggatagcctgttatggaacttctctctctcgtctggcgccagtaccgctggccgtttctgggcgttattgctctcagcctgctcagcgccgcgctgggtatcggcttaatcgctttcattaacctgcgtctgattaccgctgtcgatacctcgctgcgggtcctgccggagtttcttggtctgctggggctgctgatggcggtgaccctgggttcgcagctggcgctaaccaccctcggccaccattttgtctatcgtctgcgcggtgagtttgttaaacgcatcctcgatacccagattgaacaagtagagaagatcggcagcgcgtcgctgcttgccgggctgaccagcgatatccgcaatatcaccatcgcctttgtgcgcctgccggagctggtgcaggggatcattctcacgttcggctccgcggcctacctcgcctggctgtcaggaaaaatgatgctggtgacggcgctgtggatggcgctcaccatctggggcggctttgtgctggtctcgcgggtgtacaaacatatggccagcctgcgcgaaacggaagataaactgtatcacgactatcagacggtgctggaggggcgtaaagagctgaccctcaaccgcgagcgcgcggagtatgtgtttaaccagctctacctcccggacgcccgggagtaccggcaccatatcgttcgcgccgataccttccacctcagcgcggtcaactggtcgaatattatgatgcttggcgccatcgggctggtgttctggatggccaacagcctcggctgggccgataccgccgtggcggcgacctattccctgacgctgctgtttctgcgcacgccgctgctctccgccgtcggcgcgctgcccacgctgctcagcgcccaggtggcgtttaacaagctgcgtcagttctccctcgccccgtaccgggccgactttccccggccgcaggcgcatcctgactggcagacgctggagctgcgcgatgtcaccttctattatccggaccagcgctttgcggtagggccgcttaatctgacgctgaagcgcggcgagctggtgtttctgataggcggcaacggcagcggcaagtcaacgctggcgatgctcctgaccggcctgtaccagccaatatccggtcagatcctcgtcgacggccagccgctggcggcggagaggccagaggagtaccgcaaactgttttccgcagtgtttaccgacgtctggctgtttgaccgcctgctcgggccgcagggcgaggaggccgatccggcgctggtggcgacatggctggagcgtctgcaaatggcccacaagctgcagctggagaacggaaaaatcgccgacctgcggctgtcgaaagggcagaagaagcgcgtggcgctcctgctggcgctggccgagtcccgggacatcattctgctggatgaatgggcggcggatcaggatccgcatttccgccgcgagttctaccaggttctgctgccgctgatgcagcagatgggcaaaaccgtgttcgccatcagccatgacgatcactacttccagcacgccgatcgtctgctggagatgcgcgccggccagctcgccgaacttaccggcgaagagcgggaacaggcttcccgcgatgcggtggcccgtacggcctgattcacaacgcgcgcccggaaaagcccgggcgccgctgaaattttcagcgtctacatcgctgacggttattatttccccctcctcgcgctatgcttaaggcttccggcccgcaggccggctcaccattctcaaaaggattgcccgatcgatgtccgttttgcataaaaaaagcgcccgcttgcgtgacgaagagcgcgcccgtctgatttggctcttgagcaccgataaagcggtgacttccgcgctgctgggcaaactgacgctggctgaacgatatgatgaagggacgctggccgatgacctggccgaagtggaaatgctggtctcgcatctgccgccgccggatctcgccgatgcgctggaagcgcttccctatgacgcccgcaccgcgctatggtgcctggtgcccgacgataaacgcggcgaagtgctgctggaggcctcagagaacgtctggggcgacctgatcgacaagatgagcgaccccgagctgctgcaggccatgcagccgctggatatcgatgaacaggtttacctgctgcagcatctgccgcgcaacctgaccggacggctgctggcgaccctgccggccgagaagcgcgcccgtattcgccagattatgcgctacgccgacaacagcgtcgggtcgatcatggagtttgaggtcattacggtgcgaccggaggccaccctggcggcggtgcagcgctatctgcggcgtctcggtaaaatgccggaaaacaccgataagctgttcgttaccacccgtaacaagctgctgctcggcgagctggagctgcagaccattctgctcaatgatgcgcagaagcgggtgggggaggtgatggagggcgatccggtcacctttcagccgcacgaagaagcggagaaggtggcgcgcaccttcgaacgtgatgacttgctcagcgccgccgtcattgatgccgacggcaagctgatcgggcgcctgaccatcgatgagatcgtcgatgtggtttatgaagaaaccgataacgatctgcggcggatgggcggcctgagcgatgaagaggatgtcttcgccccggtcagcaaagcggtgaaaacccgctgggcgtggctggcggtcaatctgtgtacggcgtttattgcttcccgggtcatcgacggcttcgaacacaccatttcacagctggtggcgctggcctcgctgatgccgatcgtcgccgggattggcggcaacaccggcaaccagacgatcaccatgatcgtccgggcgatggcgctgcagcagatccagcccggcagctttaccttcctgatcctgcgtgaaatgggggtcgccctgattaacggtctggtgtggggcgggattatgggagccatcacctggtggctgtatgacgatccgcagctcggcggggtgatgacgctggccatgatgctcaacctgctgatggcggcgatgatgggcgtgataatcccgatggtcatggtgaagctggggcgcgacccggcggtcggctccagcgtaatgatcaccgccatcaccgacaccggcggcttctttatttttctgggtctggcgacgctgtttctaatgtagcctgcgcttttgcccgcaggcggcgggggatgatcgccatcgcgacaatccccgccagcacaccgatcgccagattgctggttcccaccgtcgcggcgacggtcaccagcatcaccagcgtttccggccacggattacgcgccagctcgcccgggcgaatgctgtgccagctaaaggttttcaccgccacgatcaccatcaccccggccagaaccgccatcgggatcttcgccatcacctggctgagcgctgtcaccagcaggagcagcaccaggccggcgattaccgttgagaggcggctgcgggcccggcccatttccacgttcacgatagtctggccgatcatcgcgcagccggcgataccgccatagcagccggcaaggatattggcgatacccagcccggcgctttcccgcgatttgttcgacggggtatgagtgagatcatccaccagcttagccgtcagcaaggactccatcaggccgacaaaggcgatgctgagggcgcacggccagattatctgcagggtggtcaggttcaggggaacggtcagggcggtgaaccccggcaggccgccgctcattgacccttcatcgccgacggtcggcagctgctggccggtggtcgcggtatagagggtgagcgcgacgatggcgatcagcggcgccgggatagccttaataacgcgcggcgcccacaggacgataagcagcgtcaggacgaacaggccaacgattaacggttgtcgactccagaaatgcggcacctgagcaaagaaaatcaggatcccgagggcgttgacgaacccggtcatcaccgccgggggaataaagcgcatcaggcgcgccatgccgcacagaccaaacaaaatttgaataatacccgccagaatgacagccggtaaaatgtaccccacgccgtgctgatgcaccatcgggccaatcaccagcgccaccgagcccgcggcggcggtgaccatcgccgggcgtccgccgaagactgacatcgccaggcagagcaccaccgaagcaatcaggcttacctgcgggtcaacgccggcaatgactgaaaacgaaatcacttcagggatgagcgccagggcggtgagcacgccggccagcacttcgcgcgtcagtaaagacggggagcggaggatgagacgcaggttgccggaagcggcggggtcagaaactgggggcataaaaaaagttcgcagcttataaaaaaagagggagcggtgtcaggccctgcttccgtgcggtctgtcacaaaaccagggatgatagcgcggaatctgtcagcgcaccagtacaaaaagtgatttggtgtatacatttattaaacatttttataacggatctcaaaacagaacttaaaatttaaacaatatttaaatttttgagcttcggtggtaacgtgaggggtgagaatcgtatcacctgcgctaaataaaaacagcgagtaaagtaaggctcaaatccgatgaataaaaagatggccgtaccacgctcacaggcggttggtcccaacagcactcggaccaacacccgccatgagcaagagacggatgtattgttgattggcggcggcattatgagcgccacactgggaacctggctgcaggagcttgagccagactggtctattaccatggttgagcagatgtccagcgtggcggaagagagctcaaacgggtggaataatgcgggtaccggccacgcggcgctgatggagctgaactacacgccgcagaccgccaacggcatcaatatcgacaaagcggtcgacatcaacgaagccttccatatctcgcgtcagttctgggcgcatcaggtgacgcgcggcgtcctgaacaaaccaaaatctttcattaacagcgtgccgcacatgagctttgtgtggggcgaagataacgtcaacttcctccgtgcgcgctacgcggcgctgcagcaaagtgaactgttccgcggtattcgctattctgaagaccatcagcagatcaaagcctgggcgccgctggtgatggaaggccgcgacccgctgcaaaaggtcgccgccactcgctcagaagtgggaaccgacgtcaactatggtgaaattacccgccagctgatcgccggtctgcaaaagcatgataatttctccctacagctgggcaccgtggtgcgtcgcttcaagcgcaacgccgacaagagctggacggtcaccctggcggatgccgacaatcgtcgtcagaagcgggtcattaaagccaaatttatctttatcggcgccggcggcgcagcgctgaccctgctgcaggagaccggcattccgcaggccaaagagtatgcgggcttcccggtcggcggccagttcctggtctgcgaaaatccggaggtggtgaaccaccatctggcgaaggtctacggtcaggccgaagtgggcgcgccgccgatgtcggtgccgcacatcgatacccgtattatcgacggtaaacgcgtggtgctgttcggaccattcgccaccttctcgacccgtttcctgaagaacggttcgctgtgggatctgctggcctcgacgaatacctcaaatattttgccaatgctcaacgtcggcctggacaacttcgatctggtaaaatatctgattagccaggtgatgcagaaagataaagatcgtctggccgcgctgtgcgaatattatccggaagcgcggaaagaggactggcggttgtggcaggccggtcagcgcgtgcagatcattaagcgcgacgcgaagaagggcggggtactgcgcctgggcaccgaagtggtcagcgatgatgaaggcaccgtcgcggcgcttctcggcgcgtcgccaggggcctccaccgcggcgcctatcatgctgcagctaatggaaaaagtgtttaaagataaagtcaattcgccggaatggcagaccaagctgaaggcgatcatcccaacctacggtattcgtcttgacggcaacccggcggagatcgagaaagcgctggcgtggaccagtgaagtgctggaactgaaatatgagccagccggggcggtggatgaggtaccgcaggcggagctgaagccgctgagcggcggcaagccgatggcggatatcgcgctctgataaacgctctgacaaaaacggcagcctgcgggctgccgttttttattgccgtttgcgctgttcgccttagcggacgacagcgttgccgatagtctcgtcggcgcgccagatgcgatatttcacatcgacattgctcggcgtgtataccacgatcggcagtttgctgttgtagcgcagcatggcgtcatccccgaggccggcagtgacaaatttcttctcttttttgccgtccgggcaggccatcatggtggataccgggccgctcagcttctcaaagacatagtaatcatagccccagccttccagggttttactttccagttccccgccgagacgatgatggttgcagtcgacttccagcgtctggccgatcatcagctcaaccttgagcgccgactcatcctgctgctgcggcagctgaataacctgacgcttcatgcctttttccgctttcgggaacggcgcgactttttccagcggctggtctgcggccaatgcgccagcggacatgcaggcggcggtcagcagagaaacggctagcgtagtgatttttttcacggttgatcatcctttattttcgttcctgacagagatagcctatcatcactcagctgaatgttaagatttatttaccaatttttgcaaaatgaatagtgttatctactggtaagacatcggccgcgcagagcgcaacagaggcgctggcgggccgccagccccctgccgggaaagctattcattacggctatttttcgcttcctcaataaactcttcatcgatttcatcggtattgccggcatgttctcgtcccgacagcaggttccagcaggcgataaacagggcggcgatcagcggcccgatcacgaagccgttgataccgtagatctccatgccgcccagagtggcgataaggatcagatagtccggcatcctggtatccttgcccaccagcagtggacgcagaatgttatccaccaggccaatcacaatcacaaagaagccgacgataaaggcgccctgccacagttggccggtggcgaagaggtagatggccgctggcacccagataatggccgagcccaccgccgggataagcgacagaaacgccatcagcgctccccagagaatgctgccgtccagaccggcgatccagaaggcaaagccacccagcgccccctgcgccagcgccacggcgacggtaccttttaccgtggcgcgggccacagcggcgaatttagcgaacaaatgctgcttcacatagcttgataacggtagagactcgaggatcaacagcaccagataaggtccatccttcagcaggaaaaacagcagatacagcatgatgccgaagctgacggtgaagccaaaagtccctttgccaatcagaaacgcgctgccggccagatactgaccgcctttcagagcggcatcagagagctgctgctggatctgctgcgcgctatcaaggttatgatcggcgaggaagcttctggcccagccgggaagatgggcgaacaggctggcgaccaccgtcggaaactgggtgtcgttatgctgcagtttgctgtacaccaggttgagctcgtaggccagcgaggagagaatgatagccagcggcgtaaaaacgataagacagataatgacgatggtcatcagcgccgcgaggccattgcgctcgccgaggcgggtacggatcttgtttttgaccggattaaaaatcaccgcgaggatcgcagcccaaaggatggcggaataatagggtgagagaacatcaaaaaaggccagggttacaatgaagacgataaggatgaaaaatcccttggtaagtccattaactctcatgttatccgctcctgcttatgagtcatacggtcgaataatagatgctacgacgtaatttaccatcaggatagtcgtacatcttcacgatacattgaagaaagggcacaaattaagcgagcgggcggcaacaggggaaacaggcataaaaaaaccagccttaaaaggctggtttctgtggagtttttggtcggcacgagaggatttgaacctccgacccccgacaccccatgacggtgcgctaccaggctgcgctacgtgccgacgcgtggggaacaatattacccgttccccaggcgaatgcaagcgggtcacgcgcgattgattcataattaatcaatcagttagcgataaagcgtttttcgtcagtcaggacctgcagcaacaggctgagctgcggtttctgatctttaattttctcgccgtcgcggctccaggtggtataggtgccgttatggttgaggaccacggtgatggtcggggtggtgatggccagcgtatcgccgttggccgcggtgacccagttacgacgccgcgcggcgctgaacagatcttctccctgcgagtactcattggccggcgtcgaaacgtgaagcaggcgctgcatcagcgtagtcatcacatctttgttatcggtcagggtggcaatctcctgcgccggcgtgcccggccagtgaataaccagcggcacctgcagctgctcgcgcgaccagtcgaacgcgtcgtgtttcgcattcagcggcttgccgtggccgccggtaataattaccaccgtattatcgagtttgccggcttcgcgcagcgcagtcagcacccgatcgatctgggcatcaacgtcgccagccgccttgctgtagcggcggacaaagccctgctgctgcgtgtcgtcgagggtggtgccattgagcgagatccacgagaaccagcgattctcatcctgcgcgtaacggtccagccagccgatccactgattggccgtctgctcgtcgctctgggtcttcgcgctcggcagcgagaaatcggagagcagcgcctggcgatacagcgggctgctaaacccatcggaggagaagaggcccagctggtagccttgctggttgagggcagtaatcagcgcggcgggaatacgcgccgagaggacaccgtccatatagccaggcgaaataccgtagaacaagccaaacaggccgctgtcggcggtattgcccgagctcatatgctgggtaaagttaacgttttctttggcaaatgccgccagcgccggcatggtcttttcaaaccgcgagtagttcaggttgtcgacggtgatcagcagcacgttgtagcccgcgccgaggtcacggtagcgcaggttgctaagcggatactggaccgataccgcctccggcgccccttgctccaccagacgacgctgataatcctgggcgtcgagcaggccatgtttctcaaggaaacgacgggcggtcatcggataggagagcggcagattcgcccgctgcatagtgatcgggcgatagaaattggcgtccgcccagatatagaccaggtggctgctgacgaacgacaaaaagaagaaccaggcgaccgggcgggcgtaatggcggcggcgcgtcaggctgcgcagcttttgccagctccaggtggcgaagagcatttcaatcaagaagatgaccgggacgctgataaacatcagctgccagtcgcgcgccatctcattctggtcagggttgatgaccagctcccagacgaccgggtttaagtgcagatggaagcgggtaaaaacctcgctgtctatcagcagcagcgtcatcccggcggtggcaaggatcaccgacaggaagcgcatcaggcgctgcgagaccacgataaaggtcaacggaaagaggatcagcacatagctggtaaacaccagaaagctgaaatgcccgacgagactgacgtacgaaaatagtcgtccggcaagcgtcgtcggccagtcggcgacaaaaaggtagcggctgccgagcaccatggccaacaacatgttgaacagggcgaaccagtgcccccagctaaccatctgggagactttttctcggtagggctgacgtagagtcaccatatactgttgctgttatccttaatgcgctggatcgtcgttaatcgaagattgcaaagcctgcgcgaaagaacgggcgatggcctgacgctgcgccggcgcgacgctactgttgatcaggttggtcaccatattgcctaacaccatcagtgaaaggtccaccggggctttgtgtgattccaggacgttcgtcagctcgctgagcaactgttcgacctgttgatcgctatagcgggaaatttgcggcataaactcaaaatctgtttgttcgtgaaagggcaacatattaccgtagcagcagctttttttccgcattttttcgccgcggcgcaaaagcgcatcaatcgacgttaacgacgtcgaaatgtgtggcgccagttgcgtcggccacccggcggtggttgaataccgcccggtctaaaaggagagtttaacatgagtctggatatcgaccagattgccctgcatcagttaatcaaacgtgatgaacaaaatctggagctggtgctgcgcgagtcactgctggagccgaacgcgacggtcgtcgagatgatggctgaactgcaccgggtctatagcgccaaaagcaaagcctatggcttgttcaatgaagagagcgaactggcccaggcgctgcgcctgcagcgtcagggggaagaagagtttctggcgtttagccgcgcggcgaccggtcgcctgcgcgatgagctggcgaaatacccgttcgccgaaggaggcattgtcctcttctgccagtatcgttaccttgcggtcgagtatctgctggtggcggtactcaataacctgagcagtatgcgcgtcaacgaagagctggatatccgctcgacccattatctggatattaaccatgccgatatcgtcgcgcgcatcgatctcaccgaatgggaaaccaacccggagtcgacccgctatctgaccttcctgaaagggcgggtagggcgcaaagtggccgatttctttatggatttcctcggcgccagcgaagggcttaacgccaaagcgcagaaccgcggcctgctgcaggcggtggatgacttcgccgccgatgcccagcttgataaatccgagcgacagaacgtgcgccagcaggtctacgcctactgcaacgaacagctgcaggctggggaagagattgagctggagtcgctgtccaaagagctcgccggcgtcagcgaaaagagcttccaggaattcaccgctgagcagggctatgagctggaagagagcttcccggcggatcgcagcaccttacgtcagctgaccaagtttgccggcagcggcggcggattgaccattaacttcgacgccatgctgctgggcgaacgcgtattctgggatcccgccactgataccctgaccattaagggtaccccgccgaacctgcgcgaccagctgcagcgccggacgtcaggcggcaattaagccctgcgccccgtcggcgctaccgctgaacggggacgatctccacgccgctctgcaccaactgttggcgcagcgcggcgtcgggttctccatcgacaatcagcgtactggcgaggctcagctcgccgatggcaaaggccgacgcggcgttgagcttttcccgggaggccattaccacggtttctgccgccctggccgtcagcgcgcgcttgatgcctgcctcttcgtaatcaccggtggtgaaacccgcccgcgggtggacgccggtcacccccataaagaacagatcggcgttgatccgcgccattcccgccagcgtctcggcgccgacggcgacaaccgaatgtttaaatactctgccgccgagcaggatcacctcgattcgcgggtggtccaccagcgccacggcgatgcccgggctgtgggtgaccaccgtgcagctgaggtcggcgggtaaaaagccgatcatcgccgcggtggtggtgccgccatcgacaatcaccacctgtcccggctggatcagggcggcggcggcgcgggcgaccgcctgcttggaggcgatctgcacgcttttgcgcgtttcaattggcgcaatggcggcggataccggcaatgccccgccatggacccgctgcagttttccctccgccgccagctcgcgcagatcgcggcgaatggagtcctcggagacgttaaaccgctggcttagctccccggacatcacctgtttttcctcggtgaggatctggaggatctgctgttttctctgactggcgagcatcggttttccttcatcgaatgatcttgtttgtgcacgattatgcatgttatggtgcctgctgtcacctcaaaggggaaataacatgcaaacacacgcaccgcacgtccgccacgttcgcgagacgctgctctcggataactggtacacgttgaaaaaatataccttcgaactgctgcgtcgggacggtcgctggcaggagctgagccgcgaggcctatgaccggggcaacggcgcagtcattttactctacaaccgggaaaagcggacggtggtcctgacccgtcagttccgttttccggtatttactcatggccacgacggatatctcattgaggcggccgccgggctgttggataacgcctcgccggaggcgcggatcgttgccgaagcggaagaggagaccggctttcgcgtgacccgtgtcgaacccgtcttcaccgtctttatgagccccggctccgtcaccgaaaaactctacttttttatcgccgaatatcaggccgatgaccgtcggggcgacggcggcggactggcggcggaaggtgaggacattgaagtactggagtggccgctgacgcgggcgctgcaggccattcgcgatggcgagatcatggatgctaaaaccattatcctgctgcaacacctggcgctgaatgccgacacgctcctcgccggctgagcggcaaggagcggggagttaacgcagctcgcgggcaatggcgctgtacatcagcgccgcttccaacggctgagcgttgaaggaaggttccgcctgcggccaggtcgaccactggacgatcaccagatgttccgcgcggttcaccatgatcacctggccgtagatccccagcgcccacagcgaccctttaagcccttcctgcggcgtcggctggacgttttgcgcattcgccggaatcgcgttattccaccactgatagccgtaaataccctccggatgcgctgccgagaccgagtttagcgccttggtccagctggcggcttgatcgaaccagccagtcggcaccagctgtttgccattgcttaaccgaccgtcacgggcgacgaattcaccaaagcggccccagtcttcaagggtggcgttaaagccgtgggcgccgacgtcgtgcttcccttgctgataagcatgccacacgccgtcgtgggccatcccggccggctgccatagagcctgttcaagccaggcggccagcgacatgccggtggcgcgctccaggatatccccaagcagccaggcgccgccggaagagtaggaccactgctcgcccgccgggtgttgacgcgccaggccggtgacgattttacgcacgcaggcataggcgcccgggtgcgcttcacactgggtcaggcgggcgaaatgcgactgcgggtcggtgtagtcttcattccattccaccccgctggtgtgttgaatcaactgcttcagcgttacgccgtcccaggcggtgcctttcagttcgggttcataaacggtaatcaggtcatcaagggagtggattttaccctgttgaatggcgataccgaccagcgtcgagaccaccgatttgcctaccgagcgcgaggtccacagggtggtgtcggtattaccttcggcgagatatttccaggcgactttaccatctttcagcaccagcataccgctgacgttctcgcgcttcaggtaatcctgcaaattccaggtgtggccgttgagcgtatagcgggcatcggtcagttgtttttcagcgcgctccagcggcgtcgaggcgccgtggcggaagacatcgccggcatagttgcgatagtcattgcgaaagccaatcacgcgtgaagtctgatcccagctgagcatgtctttggccgcgggtagcgtttgatcgtaaggcgttgggcagacatccagcgtcaggctgccgcagtgttgcgccattgccgccgccggcagagccgccaatattaacgccagggccagtggttttcttatcattgtcatttcctcgtttgccatagattcgctgcgcagtatataaatcggcgcgcgccggctaaaatcagcacatgggggattttcccccttaagggagaaaaaggatgaaaaccctacagtactcattcgcacagattgaagccttcgcgacgattgctgagaccggcagcctgtcgcaggcggccattcgtttagctaaagaccggaccacgctgcgcgatctgctggactatctggaagatgcgctgggctaccggctgttcagccgtgaaggacgtagcctgacgctaaccgccgagggcgagcagctgtttcgccaggcgcatctgctgttgcgtcaggcgcaggctttcgagtcttttgcgcaaacgctgccgcaaaccgccgggcaggcgctgcgtctggtgtacgatcccttcgtgccgcgtgaatttctctgtgcgctggccgataacctggcccgacggcagatccgcctgagctgctggagcgcctcgcgtcgcgaagccgagcaggcgctgagcgatggcgtggcggagatggcgatttgtcaggctaacaaccgcacgctggggagcgaaatggagtggcgggcgctcggcaccgtggatctgcgtttctacgcggcggacagcctgttccacgacgctccgcggccgctgacgctattgaatctttcgttgacgccgcagttagtgatgcaccggcgcagtgacgatcaaatcgcccgccggctgcagatttccggccatacgctgtatatgaatgaaattaccctgttgcgccatgcgctggagcaggggaggggctgggggtttttaccggaccatttgcggccaggcgagtggcagggagtcagtgaaatcgcgacggaggtcggcagtcaggggctgaacgtcactatggtgatgctctggctgcccggaatgaataagcatcggatgcttagcgacatcgtgcacgaggcgccggagctttggctgcgcagataacaaaacgccccggagcctgagaccccggggcgcttgccatacaacttgctatcggcgattacgcgcgaacgaagtcgatgtgagtcagtttcggcttgaacgcgtggcgctgaacagcctgaactttgactttttcttctttgccatcaacaacgacggtcagaacttcgctgtaaaactcagctttgtcctgcatgttccatactttgtcgtggtccagttcgatagcaaccggagcagctgcgccaccgtagatgattgccgggaacttgttagctgcgcgcaggcggcggctcgcacccttaccctgctctttacgtacttctgcgttgatagtaaacattgatgtctctctatatataaagcctgctacaggcgacccagcaacaggcggattatctgctttgcgaatgcaaaagcgggcggcattatagccgccaaacgacacccgggcaatcaaaacctcagctttccggtaattaacgcagctcgttggcgcgacgaaaacgcccctgataatcgaacactttttcccgcacctgccagtactgccccttcatgcgggcgacgacaaagtccggatggcgcagcagcgcctgctgggtcacgatatccgccggcggtatccagcgcagcggcaccccgggggtgcgggtatgcgggcgaataaacagttgttcgaaggcggtgcgctgggcgggggtctgcagacggaagcgctcactgacatccgccccgtcttcatcgtagtaggtgattttcagccacgggcccttctcgtcgccgccgtgctgcaggaccatgccgctgcagcgcagcaccagcgcgtccttcagcttcagcgccgccttcagcatatcgtccgggtcaaccagtatagtgtcgcactcccggcagcggcgggcggcgatgtcgttttccgcattacactgcgggcagtttttaaagcgaaagcggaagtcgcactgttcgcggtggccgtcgtcatcttcgaaccacccctggcagcggcggccaaagtgttcaatcaaggtgccgtcggcggtggttttgccccagaaggtattggcgaagccgcaggccgggcagaagacctgcaccggcacgttgtcgcttttgcccttcggcgtccccacttccggggcatacaggtcatgcggattgccggcgtagtcgaggatcagacagtcggttttccccggcgccaggcgcagaccgcggccaacgatctgttggtaaagactcaccgactcggtggggcggaggatggcgatcaggtcgacgtgcggggcgtcgaagccggtggtcagcaccgcgacgttcaccagatagcgatacgcctgcgctttaaaggcctcgatgatgcgatcccgctccggcccaggcgtttcgccggtgatcagcgccgcctggcctaccggcagcaggccggtcacttcccgggcgtgttccacggtggcggcaaagatcatcacccctttgcggttttcggcgaactccacgatctggctgacaatatgcggcgtgatacgctgttgttttttcagctcatggttaagatcggcttcgctgaacaggccgttgctttgcgcctgcaggcgactgaaatcgtactgcaccaccggcatatcgaggcgctccggcggcgtcagatagccgtgtttaatcatatagcgcagcggtagctcatagatgcagtcgcggaacagggccttttcatcgccgcgcaccatcccatgataatggaactgatagatccagcccttgccaaggcggaacggcgtggccgtcaggccgagcagccggatctgcggattgacctgccgcaggtgaccgatgatctgctgatactggctgtcgtcatcatcgctgatgcggtggcattcatcgacgatgagtagcgaaaattcgctgcgaaactggtcgagattgcgtgccaccgactgcacgctgccgaacaccactttgccgtggctctcttttcgctgcagaccggcggcgaagatatccgcctcgaggccaagggcgcagtatttggcatggttctgcgccaccagctctttgacatgggccagcaccagcacgcggccgcgcgccagcctggcaagctcggcgatcaccagacttttgcccgcgccggtgggcaggacaatcgccgccggctcggtatggcgacggaaccaggcgagggtggcatcgacggcttcttgttggtaaggacgtaatgtaaaagtcatgaattcacggggctaattaactggcgaatagtatgccatgaatcttttcccttgagtggtgttaagagcccgttatactagccggtgaaattcttctttttcgggcgatttgcccgctccagcactatgacaggctaaaaaaatctcatgcgacttgataagtttatcgctcagcagctgggcgtcagccgggctattgccgggcgtgaaattcgcggcagccgcgttaccgtggacggcgacattgtgaaagatgcctcttttaagctccagccggagcacgaggtggagtatgacggaaatacgctgacccagcagaatggcccgcgttattttatgctcaacaagccgcaagggtacgtctgttccaccgacgatcccgatcatccgactatcctttatttcctcgacgagccggtggcgcataagctgcacgccgccggacggctggatatcgacaccaccgggctggtgctgatgaccgatgacggccagtggtcgcatcgcattacctcgccgcgccaccattgtgaaaaaacctatctggtggcgctggaaagcccgctggcggaagggaccgctgagctgttcgccaaaggcgtccagctgcataacgaaaaagatctcaccaaaccggcgttgctggaagttatcactccgaccgaagtgcgcctcaccatcagcgaaggccgctaccatcaggtgaaacgcatgttcgccgccgtgggcaaccacgtggttggcctgcatcgggaacgcatcggcgacatcctgctggatgaatcgctggcgccgggtgaatatcgtccgctgacggaagcggaaatcgccagcgtgggcgccccgcagccacggagtaaaacgtgacgctgaagcagaattcttcactggggattgtgtttatccttggcctgctggccatgctgatgccgctgtctattgatatgtatcttccggccctgccggtgatcgccgcccagtataacgtcccggacggcagcgcgcagatgacgctcagcacctatatcctcggctttgcgctgggtcagctgctgtacggcccgatggcggacagccttggccgcaagccggtgatcctcggcgggacgctggtcttcgcggcggcggcggtagcctgcgccctgtcgcaaaccgtcgatatgctgattgtcatgcgtttcttccacggtctggcagccgcggcggccagcgtggtgattaacgccctgatgcgcgacatctatccgaaagatgagttttcgcgcatgatgtcgtttgtcatgctggtcacgaccattgcgccgctggtggcgccgatggtcggcggggcggtgttggtctggttcagctggcatgccatcttttggatcctcgccctggtggccctgctggcctcgctgatgatcggcctgtttatccgcgaaacgctgccggctgaaaggcgtcagccgttccatctgcgcaccacgctgggtaactttgccacgctgttccgccacaagcgggtactgagctatatgctggcgagcggctttagcttcgcgggcatgttctctttccttagcgccggtccctttgtctacatcaatataaaccacgttgcgcctcagcactttggctactattttgcgctgaacatcgtttttctgtttctgatgaccatgttcaacagccggtttgtgcggcgggtaggggcgttgcgtatgttccgcgccgggctgtggatccagtttgccatggcggtgtggatggtggtctgcgcgctgctggatgtcggcttctggtcactggtgatcggcgtagcggcctttgtcggctgcgtatccatggtgtcgtctaacgccatggcggtgatcctcgatgagtttccgcatatggcgggcactgcttcgtcgctggcggggactttccgtttcggtatcggggcgattatcggcgcgctgctgtcgatggcgacgtttaccaccgcctggccgatgctgatctctattgccttctgcgcaacctgctctattttcttctcgctttacgcatcccggcggcgaaaaatcgcacgctaggtcacattttcaggggcgaaatcgcccctttcttgatgcatgtcaaccgcaatgggcttcagggttctgcgatttgtttcctttatgtaaaatcaattagtgtaaaaagtcgcattgttgcgataaaaaagttgttttggatcacagaaacgggtacatatagcgccaatcggctcgccgggtataaaaaataaagcgctggattataagcgcttaaccctggtccgccgccgctgtaaacgttttctgcctcaaggcaggactatttgtcaacagtgtgttaatattgatgtaaatttattgtgaagccttttgcttccggggaaaccaagtgaatacacaacaactctctatcgtacaccgtctgccgcagagctatcgctggctggccggttttgcgggttccagagttgaaccgattccgcaaaacggcgcgcagaacgagaacagtctcgttgccctgaaattgctgagcccggacggtgagaaagcctggccggtgatgcataagctcagccaggcgttaagcgacatcgaagtcgactgttccgtgctggagtgcgaaggcgaaccctgcctgttcgttaacctgcaggatgagtttgccgccacctgtcgtctgaaaaactttggcgtggccatcgccgagcccttctccggcaataaccctttctgaccgtcagcttagcgccagcagctggcgggtatactcatgccggggtgcgctgaagacggacttgcactcgccctgttcgaccacctctccctgacgcagcaccattacctggtgacacagcgcccgcaccacgcctaaatcatggctgataaaaatataggccagctgatgctttcgctgtaaggctttcagcaggttcaggatctgcgcctgaacggttttgtccagcgatgaggtcggttcatcgaggacgatcagctgcggtttgacgatcaacgctctggcgatggcgatacgctgtcgctggccaccggagaacgccgccggatagcgctggcggctggccgggtcgaggccgacctcctgcatggcaaggatcaccgcctgttcgcgttcggccgccgtcagcgtcggctggtggacgcgcaagccttcctcaatgatctgctgcgccgtgaggcgcggattgagcgacgagttcggatcctgaaaaaccacctgcatctgtcggcgcagcggtagcagctgtcggcggttacgcccctgaatcggctggccggcgaaggttatcttgcccccggacgggatcaggcgcagcagggccaggccggtggtgcttttaccggaacccgattcccccaccaggcccagcgtctcgccggcgcgcagctgaaagctaaggctgttgaccacccgatgatgatcgaccacccgacgcaggatccctttgcgaacgggaaacgccacctttaaatcgtccgcctgcagcagcaccggggcatcggcggccagcggcaccggctccccgtccggctcgctatccagcaggcgttgggtgtagggatgcgctggcgcgctgaacagcgcccgacagtcattgtgttccacgcagcggccgttctgcataaccgccacccggtcagccagctggcggacgatgctcaggttatgagtgataaacagcagccccatgttcagctcctgcttcagctcgcgcagcagttgcagaatttgcgcctgcaccgatacgtccagggcggtagtcggctcgtcggcgatcagcagctccgggcgagtcagcagcgccatggcgatcatcacccgctggcgctcgccaccggagagctgatgcggatagtccgccagccgccgcggcgcctgacggatcccgacgcgctccaggcagtcgaggatctccccgcgcgccgcctgtttgcgcattccccggtgtaacgacagcacctcgtagagctgtttttccagggtgtgcagaggattgagcgataccatcggttcctgaaagatcatcgcgatccggttgccgcgcacgccgcgcagggtcgcctcatccgcatgcagcagcgactggccatgaaaacggatgtcaccgctggggtagctggccggcggggtagggagcagccgcagcaccgacagggcggagatgctcttacctgagccggattcgcccaccagggccagcgtttcgccgaccgccacctcgagcgacagattatgcaccacggtctgcgtctcgccctgctggcgaaaggcaatagagagattgtcgatagctaatagcgggtgggtcatattacaccgccttactcgggtcaaaggcgtcgcgaaccgcttcaccgataaaaatcagtagcgtcagcagcacggcgacggagagaaatgcggcaatgcccagccagggcgcctgcaggttgtttttgccctgcagcagcagctcgccgagggagggcgagccgagcggcaggccgaagccgagaaaatccagcgacgtcagggtggtaatggagctgcacaggataaagggcaggaaggtgagggtcgccaccatcgcgttgggcaacatatgccgcaggatgatctgccggtcgctaacccctaacgcctgcgccgcccgaacatagtcgtagttgcgagtgcggagaaattccgcgcgcaccacgcccaccagcgtcatccagccaaagagaacggtgattgccagcagccaccagaagcccggctgcacgacgctggagagcaggatgatcaggaacagcgttggcatgccggaccagacttcgataaagcgctgtccccacaggtcgattttaccgccgtagtaaccctgtatcgccccggccagcaccccgagcacgctggagaacagcgtcagcagcagaccgaagagcaccgagatgcgtgtcccatagaggatccgcgccagcacatcgccgccgttggcgtcggtgccgagccagttgctggctgagggcggcgatggaaagggaaccgtgctggcaaaattaattgtcgtcgcgccgaagcgcactggcggccatagcgcccagccgtgagtcgccagctggtgctgcagccagggatcctgatagtcggcggcggtggcgaacgcgccgccgaaggtttgctcagtgtagttttttaacaccgggacgtacagctggccccggtactgcaccagcagcgggcggtcgttggccagcagctcggcgcccaggctgcataggaagagaattaaaaacagccacagcgaccagtagccgcgacggttgtggcgaaagcgcgcccagcgggcctgattaacgggactgaagaaagacattagcggccctcaaaatcaatgcgcgggtcgaccagcgtatagctgatatcgctgacgatattcagcagcaggccaatcagagtgaaaatatagagcgtgccaaacatcaccggatagtcgcgggagaccgtcgcttcatagcccagcagacccaggccgtttagcgagaacatcacttcgatcagcaacgagccggtaaagaacatactgataaaggtggccgggaagccggcgatcaccagcagcatggcgttacggaacacgtgtccccagaggatctgtttctcaccaacgcctttggcgcgggcggtgaccacatactgtttgcggatctcgtcgaggaagctgtttttggtcagcatagtcagcgcagcaaagccgccaattaccgtcgccagcaccggcagggtgatgtgccacaggtagtcgaggatcttttgataccaggggagggtgtcgaaatttggcgagaccagaccgcgcagcgggaagaggtcgaaatagctgccgccggcaaaaatcacgatcagcaggatggcgaacagaaaggcagggatcgcatagccaatgataatcagcgtactgctccagatatcaaagcggctgccgttgctgaccgctttgcggatgcccagcggaatggagaccagatagataatcagcgtgctccacagcccgaggctcaccgagaccggcaggctgtctttaatcagctgcagcacggaggcgctgcgaaacaggctgtcgccgaaatcaaagcgcagataatcgcccagcatcttcagatagcgctcgtggagaggtttatcgaagccgtagcggtgggtgatctcggcgatgacttccgggtcgaggccgcgcccgccgcgatagtgaccctcgctgatattgcctgcgccggtgcgggcatggctggcgcccattccgccgtcgccagcccccggcatcccgccgcgctgattaaactcgatggcggcgatggcctgatcgaccgggccgccaggcgcgatctggacaataaaaaagttaatggtgatgatggcccacagggtggggatgactaacagcaaacggcggatcaggtagctgcccatgggatgtccttagcgtctgtccgcggggagggtggccgctttgttcacgtcgtaccaccaggtatcgaggccggacgaatagatggggcgggtcgcggggaaagagaacttattccaccacgcggtgcggtcctgcgccatataccacatcggcaacatgtagttattccaggtcagcacacgatccagcgcccgaccgagagggatcagtttctgcttattgccctgccactgcaggatctgcgcaatcagcttatccactaccgggctttgcacccccggcgcgttgtagctggagtgaatatagtcggacgcccaggagatttgcaggtcggtccccggccagggcatggcgcgccacaggcttggcatcatgtcgtaatcccggctgcggcggcggttgctgtactgcgaattatcaacctgacgaatatccatgacgatccccagacgctgcaggttgtgctgaaacggcagcacccagcggtcattgcccccggccggcagcagtagctcaaagcgcagcggcttgccggtggcggcgttgacccggcgctggttcttcaccgtccagcccgccgcattgagcagggcgtcggctttgagtaagttggcgcgatcgaagccatcgccgcgggagaccggcggctggtaatcctggctgaagagctccggaggcagttcgtttttcatcggcgtcggcagggccagctcggctgcgtcaggcaggctgcgggcggcatattcggtgttctggaaatagctgttggcgcgctgataggcgctgtaaaacagcgccttgttcatccattcgaaatcgaacgccagggtaatggcctgccgcacccggcgatcggcaaaaatcgggcgctgaatattgaacgccagccactgggtatcctgcgccgaggtattggtatgctcatctttaatgatgtagccgcggctgaagttgcgaccgacgtagcgggtagcccagtttttggcgacggtctcttcccggcgatcgacggctcccgctttaaaggcttcgaaagcgacattgtcgtcgagataatagtcatagcgcagcgtatcgaaattccagcgaccgcggttgaccggcaggtcggccgcccagtagtcggcgacgcgggaataggtaatatattgccccattcgccaggcgctgatgcggtatggcccgctggccagcggcggcttcgacagcgggtcgctgagtttgtgctggcgccagaacgcctcgggcatcaccggcaggctcagcagactcagcatgttctctttgccgggctggccgaggtcaatacgcacggtcaacggcgcgatggccttcacggtggtgcctttataaaacaggcgaaactgcggcaccccttcggtcataaacttgttgaaggtaaacgccacatcgcgggcggtgatcggcgtgccgtcatggaagcgggcgcgcgggttgagcgcgatctccatccaggaatagtcctcggcatagcgcgcccgctcggcaatcagcgggtagtagctgccgggctcatcatccgaggtggtgaacagggtatcgtagagcgcctccgtgcgtaccgcggggttgccgcgcagcgcataacggttgaagttatcaaaggtgccgatcgccgccagggtgagggtgccgcctttcggcgccctgggattgacgtaatcaaaatgactgaaaccggcggcgtatttcggttcgccgataatcgcgaaggctacgctttcctgaatggtttgcgccttagcgtccaggctaaacagagccagcagaatcagaaagaggcgcgcatacataggcggcagaataccctgtcatggccggcccccatggccgacatccgttcccgcatcataagtgagacttagcgcgttgtgaaatagttcgcgggttcatcgtgcgcagccaccagcccggccagcgacagcggtcggctgatccagtacccctgcaggaaatgaacgccctggccgcgaagccactccgcctgttcctgggtctccaccccttcggcgacggtcattaatttcagccggcggctgagggtcagtaccgcatccagcaccggcgaggttactgtttcagtaccaatcgcctgcacaaaaccgcgatcgatcttcagataatcgaagttataccgttcgagatagatcagcgcgctatgcccggtgccgaaatcatcaatcgcgatttcgaatccctggcggtggagccaggcgaagttagccatcgatttttctttatcaatcatcgcccgctcggttacctccagcaccacgtgaaagtggtcggctggcagcgcggcggcgaagcgcagcatatcgtcacggaagctgtcggcctgcagatgggcaggggaaatattcagccccagcttcacgccgcgcggcagaatacgcttcaacaccgcagcgtcgctggcgatcagcgcgagcaggtgatgggttagcggcacgatcatctgctgggtttcggccaggttaataaaaacgtcgggcggaatttcaccaaccaccggatggcgccagcgcattaggacctccacgccgctgatacgtagagtctgagcattaaccaccggctgataaacgatgtagaactggttatttttgatccccagcagaatggattttcgcggatccgatttgatcgtcagcacgtaatagcagagcagccccgccagcaggccgcagacgaccccgagcagcagagcaaactgcgtattttccgccagccagctgttggcatacagatagaccttcagcggtaagccctcgatctgtgcctggcggatcggcgcgttatgcagcgtttgcggatccaccagccgattactgaaggtggagatagcggtgtgatcaatggccagcgcaatgccgctgaaatcgttttgccgcgcggaatagaggatatacggtgtgagattagcgttaatcgacacgaaaatgccgctgttttgatcgccgggtttacctacccacagcgccagcgccgcgctcttcggcatcatcggcgtgcctggtaaaatcgccatagcaacgggtttgctgatatcgatggccgggatcagctggctgaggggcgtattcatggctcccgtagccgatgagcaaaaggcgatgccgtttttgaccagcaggaaagcgcggacgttggggctgaacgcggcgtgggaggtaagcccggagtcaatattctcgcagggctggtccaccagcggctgcaggccgtcaatggtctggcgcaggtcgtgaaaatagcttttcagataggtattaacattgttgataatggcgtcgaaacgctcggcccggttatggtagatcaccataaactgaatgctcccggccaacagcgcgacgatgatccccacgctcaggctggttaaccaggttttacgctggggcgaaaagtagcgagtaagcatagccagattctttccgtgttattgaagcgcatcaacggagtgtcggtcgtcgtttttctcattcccacttaaaagacatagcttattttgcgacgttgagaaccaggtggcaaaaaaaaacactgcctggggcagtgttttttatcccgcagccagccaagggataaccggcggcggtagaggacagtttacgagcggctcaggactcgacgcgcttcattgtagcgctttttccagtacggctcatccatgctggagatagtcaccccgctgctggtggaggcgtgaacaaactggttgttgccgaggtagatcccgacatggcggccggtagagccggcgcgaaacagaaccagatcgcctgtacgcagttgggcacgggaaatcgattttccggtttcctgctgttcagaggttgaacgcggcagttccagaccaaagtgttcgcggaaggtgcgctgcacaaacgctgagcagtcgatacccttgcgggtgctgccgccgaggcggtaacgcacgcctttccagctggcatactgatccattaaacgggactttacgtccaggttacggaccatcgtttcaaattcatcctgagaggcttgcagtgatgataaatcgccactacccacagcatgcgtctcagaatgcatattcctggcggtacttgttgaactacacgcggaaagcagaaccgctactgcaatcgcgggggctacccgcaagatatatctcaaaatcggctgagatttgaccatgctgtttattttcccttgttgtccttaacgacaatgtcgttataaaaaatgccaaacgtgttagagcctaaatacccatccgcaatgagacaattccttaagcttaaatttgtgcagtcacgcacaattttattcatgccctgaattaatgctgcggaaaaggcaaaacgagaacgagattaccctatcaaacgccgcatggcgagcggttttgcgcgatttcttataagtattttggtgacaaaaagtgaatcatcgggaaaggccaaaattacggcaatatcgggcaaaaaacagacaattccttcatttgtcacgggattaatgtgacaagaagatgaacgtcatgttgaaaaaagggaaaatgtaaaaagggacccaaaaggtccccttatagttaatgactctggcggctgccggagacattatttggccgatattctgctgggtaagtagcgatcgaaaaaggcgatcaatttatcgctcagcggggtcatcaatacccagggcgcgccgatcagcacggcggtcagggagccgacggcaatatcgctaaaccagtgggcgccaatcattacccgcgggaaagcaaagaccacaaagataatcagcgcgacgcccagcgcgcgacggccaaaatagcgccacataaagctcgcgaagatcagcagcatcatcccatgatcgccagggaagctgtccttcgacgcatccttagtggggaagttaacgacgtcgctgacgcgggtaatatcgctaaaaaacagcgacgggctggcgcgctgtaccggcatcaggtgttgtgcgagctggttgatgatcaccgccgccagcagcatcaccaggcccatgatggcgatctgacgacggcctgcagtcggcgcctttagccaatagctcagcatcaggcagcccatcgccagcagcgaacaggcgtcgaaggcgcgattgttgatgatcgccagcagccaggcataagcatggctgacgctgacgccatggttaaagaaatggaagatcgcggagtcgaccggcaaccacgcgccatggttggctggcagataccaggagcaaaatagcgctacacccgcgatgttaagcagcaggattaaaggaattcggtttttcatcatagccattgcgattttgtgacagtcggcggcaaccttagccgccttaacttaaacgaagcctcaacaacgaggtctggagtgcgttccagtcggcttcattcgcggaaataagctcgatccggctatcgggcggagcgacgctgagggtctcgatatggagatcctccccctgacggttgattcgcaccgccccctcggcaatgcgcatcacgcctttaacgcgccccactggcgccagcctggcccattcgagcaggccgatggtgtcaaagaccgtctccgcgtcgaagatccagccgcagccctgatagccctggccattgttgagatggcggcgccagcgctggtgttccgccaggctgagcgcggcgaggccggaagtggggggatggcggtgggcgtgctccgcgctcgccgccccagcgctgccaccagtcggccagcgcccgggcgctttcggcggtttcccgatcacttttattcgccacaatgatgtccgccgcggccagctgatcgcggaagttgtcgttgctgacggctctttcatccagcagttggcggggatcgaggatgcacagggtggcgcgcagatcgatccagggctcatacaccgccgcggtgaggatatcgaggatctgctttgggtggcccaaaccggtgggttcaatcagcaggcgatcgggtttgccctggcgcagcagggtgttcagcccaacctgcatcggcaggccattgacgcagcacatgcagccgccggggatctctttgagcagggcgccgctgtcggccagcagcgcgccgtctatcccgacttcgccaaactcgttaaccagtacggcccatttttcatccgcaggcttctgcgccagcagatgaagaatcgaggtcgtcttaccgctgccgagaaagccggtgatcaaattggttctggtcactcttttctccaggataaatgtaatgttgtaacagttacgcctatcctgacgaaaaaagggggaaaagagaagtcctgaggcggacagaagagaattctgtccgcataagcgcaaatattgttaagaattcagcgcgcgggcgacggcctcgcgggcgccgtgcgtcgccagctgttgccaggcggcgcggatcccggcgacaaactgggcgttgtgcggcaggtcgcggccaaatatttcctccagccccagcagggcgtcgacgcgctgctgctcatcgctctgggccacccgctgccggatcttgtcgaccagcggatcgcgcacgtcgatcgtctgaccggcgtcgtccgtgccgctgacgtagcgcatccagccggccacgccgagagccagcagcggccaacggctgtcgcgcgccagatgtacgcggatgccatcgagcatgcgctggggcagcttctggctaccgtccatggcgatttgccaggtgcggtgtttgagcgccggattgctgaagcgggcgatgagactgtcggcataggccagcagatcaacgccggtaatggtcagcgtcggagcctgttcgtcaagcatcagctggcgggcggcgcggcggaagacgtcatcccgcatgcagtcgctaatgtgcgcatgccctgccagatagccaagccaggcgaggaaagagtggctgccgttgagcatccgcagcttcatttgctcccagggcaacacgtcatcggtcatctgcacgcccgccgtctcccaggcggggcgcccggcgacaaagtgatcttcgaccacccactgaatgaagggttcgcaactgatggcgcagggatcgtcgacccccagcacggtggcgatttccgccagcgactccggtgtggccgcaggaacaatacgatccaccatggtgcccgggaagctgacgttgtcggcgatccagtccgccagcgccgggctgcgtttttccgccatgccgaggacggcattttttaccacgtgaccgttgtcggggatattatcgcaggagagcacggtaaagggcggaaggcctcgttcccggcggcgggccagcgcttcaactaaaataccgggagctgactgcggcagcgtcggattctccagatcgtgaataatgcgcggatgcgtcggatccagtttcccggtcgccggatcgatgcagtagcctttttccgtaatggtcagcgagacaatcgctacctgcggctcgcaaaatttttcgataatcgccgccagcgaatcgagcctggcgttcagacattcgtgcaccgcgccgatcacaatgggctggttgccgtcggcgcctttttccagcacggtaaacagatggtcctgttcgcgaagctggctcatcagcgtgtcgccgctgaacagactgatttcacagatcccccagtcgccgccgacgttattcagcacgcgatcggtgagcagcgcctggtgcgcgcggtgaaacgcgccaaagccgaaatggacaatacgcgagcggagctggctgcgatcgtattgagggtattgcacgttcttcggtagcgtagcggttgcaattgttgtcattcttcccacacctgtttaactgcttattaacaatgccagtctaaagttatatgacaggaagttaaattggtaagccgaaattatccgctgactgtgagctggatcaatcaataggccagcactgtttgcagccaggtgagaaacatgtatggtagtcgtcatgagtgtcgccattattggtataacaacttttgtgagggcatagcgatggagcaaacctggcggtggtatgggccgaacgatccggtatcgcttgatgatgtacggcaggcgggggcgaccggcgtcgtcactgcgctgcaccatattgcaaacggtcaggtatggccggtcgacgagattaaagcgcgtcaggcgctgttagcggcaaaagggttgacctggtcggtcgtcgaaagcattcccgtccacgaggatattaaaacccacagcgggcagtatgcgacctggattgccaactatcagcagagcatccgcaacctcgcggcctgcggcatcgataccgtgtgctacaactttatgccgatcctcgactggacgcgcaccgatctggaatatgagctgccggacggctcccgggcgctgcgtttcgatcagatcgctttcgccgcctttgagctgcatatccttaaacgcccgggtgcggaagcggattacagtgaagaagagcagcgtcaggctgaggtctatttcaaggcgatgagcgaagcagatatcgataaactgactcgcaatatcatcgccggcctgccgggagcggaagagggctacacccttgaccagttccgcgcgcgtctggcggagtacgaccacattgataaagcgcagctgcgtgaaaatatggcctatttcctgcgcgccatcgtgccggtatgcgaagaggtagggatccgcctggctgtgcatccggacgatccgccgcggccgatccttggcctgccgcgtatcgtgtcgaccatcgaagatatgcagtggctgaaggagacggtggatagcattaataatggcttcaccatgtgtaccggatcgtatggcgttcgcgccgataacgatctggtgaagatggtggagacctttggcgatcgcatccattttacccatctgcgctctacctgccgtgaagcaaacccaaaaaccttccacgaggcggcgcaccttagcggcgacgtcaatatggtggcggtggtggatgctatcctgcgtgaagagcagcggcgtaaacaggccggcgatctgcgcccgatcccatttcgtccggatcatggtcatcagatgctcgacgatctgcgcaagaaaaccaacccaggctattcggcgattggccgtctcaaggggatggcggaagtgcgcggcgtcgagctggcgctgaaaatgaccaaataccctgaactgctgtaatcgcggcaatggggataataaaaaggacagccagcgctgtccttttttactgtcggggcgttaccgatgattaatccgcgcggcccatatagcggcactcttcgatatgaatgcggattttctcaccggtggtcaggtattccggcacctgaatcaccaggccggtgctcatggtggctggcttggtgcgggagctggcggacgcacctttaatacccggcgcggtttcgataatttccaggtcaacggtctgcggcagctccagcgccagcagctggccgtcccaggtcaacacctgcatgtccggcatcccaccttccggaataaactgcagctcttcttcaatctgctctttggtaaaggtgtaaggggtatagtcttctttatccatgaacacgtattcgttgccatcgacgtaggagaagtcgacgaaacggcgggtcagggtgacggtatcgacgatatcgtcgcctttgaagcgctcttctactttcaggccggtgcgcacatcggagaagcgcattttatacagtgtcgcagcaccgcgggcgctgggtgactgaatatcaatatttttcacaatcagcagcttgccgttgtaattcagcaccataccttttttaatttcattcgctcttggcattgcagtaatcctgtcacttaacgagtcaaaaatatcgcgtaaaactactcgcgcccgggcgttcaggcaagcggatttcgcgagttttgctatcttctggcaaaacgtttaggctgtggcgcaaaatgagcgtttgggagtcgggttgtggaatgtcgtactgattgtggcgcatgttgcatcgccccctctatatcatcgccgatccccggcatgccgcagggcaagccagctaacacccgttgtatccagctttccgagcgcaatttatgccttattttcggctcccctctgcgcccgaaggtgtgcgccagcctgcagccctcgccggagatgtgcctcacccaccgcgatgaagcgatcacctggctgctggagcttgagctggccaccgcgccctgagctcaacgcagcagatgagagggatggaaaccaatgtgcttacacgtctcttatccgccacaggcaggcctgagtgacaacgcccatcgccagcgcaatccagaacaccgcgtgatagctccagatctccgctactacccccgccagtgaaccggcgatgatccagccgacgcgggtagtattggtatagagggtggtggccgctcccgcctgccccggcatcaggtcctggaaatagagcatgccgatcccggcgaggatcccgatatagatggcgttcagcacctgcatcgccagcagcagcgctggcgtatgcaccgtcagcatgccgacgtaaaacagcaccccggccactgcagaaagacgcatcagaaagcgtttgccgaaacgccgggcgtagtaaccggcaatcagcatggtcggaatttccagtccggcggcggtgcccatcatcagccccgccagcttctccggcagatgcagctcgttaatgataaacagcggcatgttaatgatgtacaggctgttagtaccccacatcagggtgcagatgctgaacagcagcagcgcatcgcggcgatgcgtgcgcggagcttccagccggccggtcgctaccggctttgctttgcgcatgctgggcaagaatagccagaccatgatcccgcagacgataaacgccgccgcggcgctgagatacatcgcggtaaaaccaaaccccatcgccagggcgtaggccagcgggggaccaatcacccatgccagggagacctgggcacgtaaaatggagctgaacatcaccgcttcgcggccggtcctgtcggcatgctcccgcgcgagggcaaacatctgcgggttggcggtcgatccaaagctgctgagaaaaacgccgatgaacagcaaaatgaaatagttgcggttccaggcaaagaggacgcaggccagcacccccagcagacagcagacgacaatcagctgcttgcgatcgccctgacggtcggagcggccggcgaggaactgactgaccagaatgccaataaccgcgctgccggtaaaaaagaaaccgaccatcgccgggcggacgtgcacttcgttggtcagaaacaggctcagggtcggggtttgcagcgccccggcaatgcccgtcagaaaggcgacgattaagaaggcggaagaggtgacatcgaacccgcgtcgggggagagcggcgctacggttttccatgggtttggttttctgtagtttcaggagacggcgcggagtttacgcctgctggctaaaaataaacagtagtatggcacgaataattaaaaaggcgtttcaaaatatagggttcagcaaaaagctgacgttcgaggcggtcgatagctaatgcttcagcaaaagtgtgcagtacctctaagttctgcgatcaagtagctgacgtaccttgcgcgttgagcaagaaaggtacaaaattcttgaaacgtttcagcgtcattcggcaatccgttccccgtcagatggcgccttttttctcaagttagctgaaacgattcaattcagcaggagaggagaaccatgttccagttatctgtgcaggatattcatcccggccagcaggccggtaataaagaagaggccatccggcaggtcgccgccgcgctggtcagcgccggcaacgtggccgatggctacgtgaacggcatgctggcgcgcgagcagcagacctcgaccttcctcggcaacgggattgcgatcccgcacggcacgacggatacgcgtgaccaggtgctgaagaccggcgttcaggtgtttcagttcccgcagggcgtcacctggggcgaagggcagaccgcctatgtggcgatcgggattgccgccagctcagatgaacacctcggcctgctgcgtcagctgacccacgtgctgagcgatgacgcggtcgccgcgcagctgcagtccgccaccaccgcggaagagctgcgcgcgctgctgatgggagagaagcagagcgaagcgctgaagctggataacgagaccctcagtctcgacgtcgcggccagcgatctgctgaccctgcaggcgctgaacgcggcgcgtctgaaagaagttggcgctgtcgatgccgccttcgttagccacgtcattaacgatacgccgctgaacctcggtcagggcgtctggctgaacgacagtgcggaaggcaatttgcgcagcgccgtggcggtcagccgcgcggctaacgcctttacccgcgacgagcagccggtttccctgctggtcacggtggcgatggccgacgagcagccgaccgcagtgctgaaccgtctgagcaagctgctgctggacaagaaagctgaacatttgctgaaagccgacgccgccaccgtgctggcgctgctgaccagcgacgacgccattgccgaagatgtgctgagcgccgaattcgtggtgcgcaatgaacacggcctgcatgcccgtccgggcaccatgctggtcaacaccattaaacaattttccagcgacatcaccgtcaccaatctcgacggttccggcaagccggctaacggtcgcagcctgatgaaggttgtggcgctgggtgtgaaaaaaggtcaccgtctgcgttttaccgcgcagggtgaggatgcgcaacaagcgctggatgcgattggcgaagcgatcgccgcaggccttggggagggcgcataaatgagcagacgtgtagcaacgattacgttaaacccggcatacgacctggtgggattcaccccggagattgaacgcggcgaagtgaacctggtgcgcaccaccggcctgcacgccgccgggaaaggcattaatgtggcgaaagtgctgaaagatctcggcattgacgtcaccgtcggcggtttcctgggtaaagacaaccaggacggctttcagcagctgttcagcgagctggggatcgccaaccgtttccaggtggtgcagggccggacccgtatcaacgttaagctgacggaaaaagatggcgaagtgaccgatttcaacttctccggctttgaagtcaccccgggcgactgggaacgcttcgtcaacgactccctgagctggctcgggcagttcgatatggtctgcgtcagcggcagcctgccgtccggcgttagcccggaagccttcaccgactggatgacccgtctgcgcagtcagtgcccatgcatcattttcgacagcagccgcgaagcgttggttgccggactaaaagcggcgccgtggctggtgaaaccgaaccgtcgcgaactggaaatctgggctggccgcaagctgccggagatgaaagatgttatcgacgccgcccatgcgctgcgcgagcagggtatcgcccacgtggtgatctccctgggcgaagagggcgcgctgtgggtcaacgcctctggggagtggattgctaaaccaccttcagtggaagtagtcagtaccgttggcgccggcgattcgatggtcggcggcctgatttacggcctgctgatgcgtgaatccagcgagcataccctgcgcctggcgaccgccgtcgctgccctggccgtcagccagagcaatgtaggaattaccgaccgtacccagttggccgcgatgatggcgcgcgtcgacttacaaccctttaattgacagcaggagaggcataatgaaaacgctgctgattattgatgccggactcggacaggcgcgcgcctacatggcgaaaaccctgctgggtgccgcggcgccgaaagcgcaccttgagctgattgataacccgaatgacgccgaactggccatcgtgctgggaaccgcgctgccggccgatagcgcgctgaatggtaaaaacgtttacctgggcgatattaaccgtgctgtcgcccatccggagctgttcctgggagaagcgaaagaccacgctaagccctacgttgcgccagcggcggtagccgttccggccgccgctcaggggcagaaacgcattgtcgcggtcaccgcctgtccgaccggcgtcgcccacacctttatggcggcagaagccatcgaaaccgaagccaaaaaacgcggctggtgggtgaaggtggagacccgcggctccgttggggcgggcaatgccatcaccccggaagaggtggccgaggcggatctggtgctcgtcgctgccgatatcgaggtggacctggcgaaattcgccggcaagccgatgtaccgcaccaccaccggtctggcgctgaagaaaaccgcccaggagctggataaagcggtggcggaagccaaaccgtaccagccatccggcaaacctcaggcggctgctgaagggaaaaaagagtcggcgggcgcctatcgccacctgctgaccggcgtctcctatatgctgccgatggtagtggccgggggcctgtgtatcgcgctctcctttgccttcgggatcaaagcgtttgaagtgaaagacaccctggcggcggcgctgatgcagatcggcggcggctcggccttcgcgctgatggtgccggtactggcaggctttatcgccttctccattgccgaccgtccgggtctgaccccgggccttatcggcggtatgctggcggttagcggcggctccggctttatcggcgggatcatcgctggtttccttgccggttatgtggcgaaagccatcagcacgaagctgaaactgccgcagagtatggaagccctgaagccaatcctgatcattccgctggtctccagtctgatcgtgggtttggcaatgatctatctgatcggtaaaccggtagccggtatcctcgcctggctgacccactggctgcaaaccatgggcaccgccaacgcggttctgctgggcgcgatcctcggcgcgatgatgtgtaccgatatgggcgggccggtaaacaaagcggcctatgcctttggcgttggcctgctgagtacccagacctatgcgccgatggcggcgatcatggcggccggtatggtgccaccgctggcgatgggtatcgcgacgctggtagcgcgcaataagttcgacaaagggcagcgggaagggggcaaagccgcgctggttcttggcctgtgctttatctcggaaggggcgattccttttgccgcccgtgacccgatgcgcgttctgccgtgctgtatcgtcggcggcgcggtaaccggcgctatctccatggcggtcggcgcgaaactgatggcgccgcacggcgggctgtttgttctgctgatcccgggggcgattacgccggtgctgggctacctgctggcgattgttgccggaacgctggtggcgggccttgcctacgccgtgctgaaacgccctgaggcgcaaacagcggaagttgaaaaagcggcataatcctaccgcaataaaaaagggccgattgttcggccctttttttgtctctatttacgccacttcggcaatctgctgcgcccgcagccaggcaatctcttccgcccagatatccgggttgatggtttccagaatcagcggaataccgtcgaagcggctgtcctgcatgatccagctgaagcaatcgtggccgatgttgccttcccccaggctgtggtgacggtcgacccggctgccgaaggcgctcttggcatcgttgagatgcatgccgcgcagatactgaaaaccgacgatgcgttcgaaggcggcgaaggttttttcgcaggcttcggcgctgcgcaggtcgtagccggcggcgaaagcatggcaggtatcgatgcagacgccgacgcgggatttatcttccacaccgtcgatgatggccgcgaggtgctcgaacttaaagccgaggttgctgccctggcctgcggtgttttcgatcaccgcagtaacgccttcggtcttcgccagcgcgatattgatcgattcggcgatgcgcgccaggcactcctcctccgggatctgctgcagatggctgccggggtggaagttgagcagcgtcagtcccagctgctggcagcgggtcatttcatcaatgaaagcatcacgggatttttccagcgcttcttccaccgggtggccaaggttaatcaggtagctgtcgtgcggcaggatctgccccgggccaaagtgatacttttcacaggcggctttgaattcggcgatggtctcgtcgctgagcggcgcggcgcgccactggcgctggttcttggtgaagagggcgaaggcggttgcttcgatttcggcggcgcgaatggcggcattggccagtccacctgaggcgctcacgtgcgctcctacgtatttcataaaaaaaactccagttaaagccgctggggggtgggtaatgatagcggcttaactggagaaagatgtagtgctttatgccatcaggctgtggatagcgacgttaatgaccccgccgccgacaatcaaccagacgaacagcatcagcgccatcagcagcggtttcgccccggcttttttcagcgcgctgacgtgggtggtgaccccgagggcggccattgccatcgccagcaggacggtatccagcgtcaccagcatatccaccacggctttcggcagcagatggaaggagttaaacaccgccaccaggatgaacataatggcgaaccacggaatggtgattttgcttttctcgccgttgcctgccggggtcagctgtttaacacgcgccgccaggaacagcaggaacggagccagcatcatgacgcgcagcattttggcgataaccgccgcgttctccgcgtccgggctgaccgcatggccggcggcaacaacctgcgccacttcatgcatggtggagcccatatagatcccgtagttctccggggtaaaccagtgcgccagcagcgggtacatcgccgggtagaggaagatggcgatggtaccgaagataaccactgtagcgacggcaaccgtcactttactggcttcggctttgaccaccggctcggtggcgagcacggccgccgcgccgcagatgctgctgccggcgccgatcagccagctggtgtgtttatcgagaccaaacactttctggccaaggaagcaggcgatgaaaaaggtactggagagcgtcagaacgtcaatcaaaataccgctcacgccgacgtcggcaatctgggcgaacgtcaggcgaaagccgtagaggatgatccccaggcgcagcagatgctgcttggcgaagatcaccccgccgtcgcagggctgccagattttcgggtagaccgtgttgccgacgaccatcccgaacaggatagcgagggtcagggcgctaaagcccgcgccggcgatggccgggaaactaccggcccacagggcggcgccggtcagagcggcggtcagcgccaggcctgggacaaaatgccacagggaacgatgtttggtgggtaaagtgagtgctgtcataaccttctcctttgtctgcctaaaggttacgccgcgcgggattaaatataaaattgattatatgtttataatcaatcgtaataagtggttaatggccgcttcgccggttacaacggggcgagagcgggttaggcagaagcggggcggtctcgccggcaagacgatgattttgtgatataagcggattttccttccgtcagccgcctcgatttgtgtcaccatagtaaggaaggttattcaggttggattactaaacgggtgggttatgcatattacgctgcggcagctggaagtgttcgccgaagtccacaagagtgggtcgaccactcaggcgtcacagatgctggcgctttcgcaatccgcggtcagcgccgcgctgaccgatctggaagggcagctcggcgtgcagctgtttgaccgcgtcggtaaacgactggtggtgaatgagcatggacggctgctgtacccgcgtgcgctggcgctgctggagcgggccctggagatcgagcagctgtttcgcggcgataacggggcgatccgggtctacgccagcagcaccatcggcaactatattatgccggagattattgcccgctatcgtcatgacttcccggatctgccggtcgagctgagcgtcggcaacagcctggacgtcatcaacgccgtcgccgacctgcgggtggatttcggcctgattgaggggccgtgccatgccgccgatattattgccgagccgtggctggaggatgagctggtggtgtttgccgcgcccaactcaccgctgctggcgggggaggtgaccctgcagcaactggccgaggcgccgtggatcctgcgcgagcatggctccggcacccgggagattgtcgattacgttctgctgtcgcatctgccggcgtttcatctgggcatggagctgggtaattcagaggcgatcaagcacgcggtcaggcatggcctgggcatcagctgtctatcgcggcgggtgattgccgaacagcttgcctcgggcacgctggcggagctgaaagtgccattgccccggctgacgcgcacgctgtggcggatccatcaccggcagaagcatatttctaaagcattacaacgttttctgcactattgccaggtgtagcagcccggttttatcgcctgattacggggggaattcgctggcaattccgcaggttagtgctttactaataatttgcgggcgatcatgaagctctcttataactttgcatttgtaccggatggaaccccgatcgtctgctacaatcgcgcctcattttttggatggatagcattatcacatggtttcggaatctaaaaccacagaagcgcccacgctacgtcgtgaactgaaggcgcgccacttgaccatgatcgccatcggcggttccatcggtacgggtctttttgttgcctctggcgcaaccatttcgcaagcaggtcccggcggggcgctgctgtcttatattctgatcggtttgatggtctatttcctgatgaccagcctcggcgagctggcggcgtttatgccggtatccggttccttcgccacctacgggcagaattatgttgaagaaggcttcggcttcgcgctgggctggaactactggtacaactgggcggtgacgatcgccgttgacctcgtggcctcacagctggtgatgagctactggttccctgacactccgggctggatctggagcgccttgttcctcggcatcatgttcctgctgaactggatctcggtgcgcggctttggcgaggcggaatactggttctcgctgataaaggtagccaccgtcattatctttatcatcgtcggcgtgatgatgattgtcggcatcttcaaaggggcgcagccagccggctggagcaactgggggatcgcggatgcgccgttcgccggcggtttctcggcgatgattggcgtggcgatgattgtcggcttctcgttccagggcaccgagcttatcggcatcgctgccggtgaatctgaaaatccggagaagaacattccgcgcgcggtgcgccaggtcttctggcgtatcctgctgttttacgtcttcgcgatcctgattatcagcctgatcattccgtataccgatccgagtctgctgcgcaacgatgtgaaggatatctccgtcagcccgttcaccctggtgttccagcatgccggtttgctgtcggcggcggcaatcatgaacgccgttatcctgactgccgtgctgtcggcggggaactccgggatgtacgcctccacgcgtatgctgtacaccctggcctgcgacggtaaagcgccgcgtattttctcgaagctgtcgcgtggcggcgtgccgcgtaatgcgctgtacgcgaccaccgtgatcgcggcgctgtgcttcctgacttccatgtttggcaaccagacggtgtacctgtggctgctgaacacctccgggatgacgggctttatcgcctggctgggtattgcgatcagccactatcgtttccgtcgcggctacgtcctgcagggtaacgatattaataatctgccgtatcgttccgggttcttcccgctggggccgatcttcgccttcgtgctgtgcctgatcatcaccctcggacagaactacgaagcgttcctcaaggacaccattgactggggcggcgtggcggcgacctacattggtattccgctgttcctcgtcatctggtttggttacaagctggcgaaaggcacccgctttgttcgctacagcgaaatgaccttcccggaccgctttaagcgttaatcttcgcgattgtgcgataaaagccctctgtgaagagggctttatattgctggcaaagtgcaatcttcagggattgcccggcggcgctgcgcttgcgcgggcctacagataaccgcgtaactgattgatattgctatttttgtaggccgggtaaggcgaaagccgccacccggcagacatgtgagcacaataacgaagacagatttgtcatcacccggaagccctctgaacagagggctttttttatgtttgtgcggttacagcttgtcacaattcttcataattatattgataatcgtaatcattatctttatcattttcgcccattacggatgaagccactccccgtctctgccgcttgtacagactgacaccgggcgaccagccacatcgacgagaaaacagcgcgagcatgccgccgacagagcggcaagccgccagcgcgtgtgagcagcaccttgttgtttgtttggttgtacacctcatggagatttggaatgttcaggttaaccccttttatccgggcgggattgtctgcgtccgtcgtatcgttggcgtttccggctctggccgatgtgaatgaagaaacgctggtggtgaccgcctcggccactgaacagaatgtcaaagacgcgccggcgagcatcagcgtcatcacccaacaggatttacaacgcaagcctgttcagaacctgaaagacgtgctgcgcgatgtgcctggggtccagctcaccaacgaaggggataaccgcaagggcgttagcatccgcggtctgagcagcagctataccctgatcctggtcgacggcaagcgcgttaactcgcggaacgccgtcttccgccacaatgacttcgaccttaactggatcccggtggatgctattgagcgtatcgaagtggtgcgcggcccgatgtcctccctctacggctccgatgcgctcggtggggtggtcaacattattaccaaaaaaatcggccagaaatggaccgggacgctgagtgctgataccactattcaggagcaccgcgatcgcggggatacctataacggccagttcttcaccagcggcccgctgatcgacggcgtacttggaatgaaggcctacggcagcctggcaaaacgcgccaaggacgatccgcagtcatccagtaatgccaccggcgagacgccgcgcatcgagggcttcaccagccgcgatggcaatgttgaattcgcctggacgccgaacgaaaaccacgattttaccgcaggctacggctttgaccgtcaggatcgcgattccgattcccttgaccgcaaccgccttgagcgggagaactactctctgagccataacggccgctgggatatcggcaatagcgagctcaagttctacggcgaaaaggtggataacaaaaatccagggcagagcgggactattacctcggaaagcaatgccatcgacggcaagtatgtcctgccgctgggcatgattaaccagctggtgaccttcggcggcgaatggcgccacgacaaactgaaagatccggtcaacctgagcagcggcggccagtcaacgtcggccagccagtacgccctgtttatcgaagacgaatggcgcatcatcgagccgctggcgctgaccaccggcattcgtatggacgaccatcagacctatggcgatcactggagcccgcgcgcctatctggtgtataacgccaccgataccgtcaccgtcaaaggcggctgggcgacggcgtttaaagccccgtcgctgctgcagcttaaccccgactggaccaccaactcctgtcgcggctcgtgcagcatcgtcggtaacccggatctgaaaccggaaaccagcgaaagcttcgagctcggtctctactaccgcggggaagagggctggcttgaaaatgtcgaaggcagcatcaccaccttccagaataatgtcgacgacatgatcgacgttctgcgcacctccagcgccagcgaagcgccgggctacccgaactttgtcggctggaaaaccgtcaacggcaagcgcgtgccgatcttccgctatttcaacgtcaacaaagcccgcatcaaaggggtggagacggaggtgaagatcccgtttggcgatgagtggaagctgacggtgaactacacctacaacgatggtcgcgatctgagcaatggcggcgacaaaccgctgcagacgctgccgttccataccgccaacggcacgctcgactggaaaccgctggacgattggtccttctacgtgacggccaactataccggccagcagcgcgcggtgagcgccaccggcaaaacgccgggcggctacaccctgtttgacgttggcgcggcatggcaggtgaccaaaaacgtgaaactgcgctccggggtgcagaacgtgggtgataaagatctgagccgggacgactacagctataccgaagaaggccgtcgctactttatggcggtggattatcgcttctgattgccggcgctaaaacgcgtcctgtaggcctgaacatgcgccgcgaagcagcttcgcggcgcattggcgtttagccaaagagatgctgcgcatggaagcgcagatggtcttcaataaacgaggcaataaagtaatagctgtggtcgtaaccgggctggatgcgcagcgttaacggccaggccttctgccgcgcgacctccgccagtaccgccggctgcagctgtccggcaaggaaaggatcgttgtcgccctgatcgataagcgtcggcacggcgtcctccggccggctggcctgcatcagcgcgcagctgtcccaggagtgccatgccgattcatccgcgccgagataggcggtaaacgctttcttgccccacgggacctgggagggattgacgatcggcgcgaaggcggagacgctggcgtagcggccgggatttttgagcgccataatgagcgcgccgtggccgcccatcgagtggccgctgacggcgcagcgttcgccgacgctaaactcgctacgaataagcgcgggcagttcgtcacgcaggtaatcgtacattcggtagtgcgccgcccagggcgcctcggtggcgttcaggtagaagccggcgccttgtccgagatcgtaaccgtcgtcgttggccgcctcgtcaccgcgcgggctggtatccggcatcaccagcgcgatgcccagctcggcggcaatgcgctgggcgcccgccttggtggtaaagttctcatcgttacaggtcagccccgacagccagtacagcaccggcggcggcgtttcgcgctcaggcggtaaaaaaatgctgaacgtcatggcgcagttcaggacaggggagtgatgacgccagcgttgttgctggccgtcaaaacagcgatgctcttcaagcagttccatgcaaggctcctcggaagggatgtgcgcgtaaacgttcataatacagatatttcattagccggtgagcaactttcactttctccttttgagaacttactgcatcattaatgcaacttatagccaacatgccggtgtagcgacggcgcttatgaatgcgtacagcggttggaacattccggatacggcgataaggatttggcgttgcgcctgaggcatggcttcgctccctaataaaaggcagcgccaatttcaataattatcgttacggctactggattctgtgcgccacctcacgcacaatgaatacaaactttgcccccagaaaaagcaaagagcgccacacctgcaggagaaacataaatgtcatcactgagtaaagaagccgtcctcgttcatgaagcgctggtcgctcgtgggctggagacgccgatgcgtgcgccagtacaagaaattgataacgaaacacgcaagcgtttgattaccggtcatatgaccgagattatgcaactgctgaatctggatctgagtgatgacagtctgatggagaccccgcatcgcatcgccaaaatgtatgtcgatgagatcttctccgggctggattattctcgcttcccgaaaatcaccgtcattgaaaacaaaatgaaggtcgatgaaatggtcaccgtgcgcgatatcaccctgaccagcacctgcgaacaccatttcgttaccatcgatggtaaagcgacggtagcctatatcccgaaagattcggtgatcggcctgtcgaaaatcaaccgcattgtgcagttcttcgcccaacgtccgcaggtccaggagcgtctgacgcagcagatcctgatcgcgctgcagacgctgctcggcaccaacaacgtggcggtatccattgacgcggtgcattattgcgtgaaggcgcgcggcattcgcgacgcgaccagcgccacccccaccacctctctcggcggcctgtttaaatccagccagaatacccgccaggaattcctgcgcgcagtacgtcaccacgactaaaacggagcagggtgcatggagagaaatgtcacgctggactttgtccgcggcgtcgccatcctcggtatcctgcttctcaatatcagcgccttcggcttgccgaaggccgcttatctcaatcccgcctggtcaggaagcgcgtcccttagcgatgcctggacctgggcgctcctcgacctgctggcgcaggtgaagtttctcaccctgttcgcgctgctgtttggcgccggtcttcagctattgcttccgcgagggaagcgctggatccagtcgcggctgacgctgctggcgctgctcggtttcattcacggtctttttttctgggatggcgatattctgctggcctatgccctggtggggctggtgagctggcgcatggtgcgtgaggcgcaccatgtcaaatcgctgttcaacaccggggtggtgctctacctcaccggcattgcagtgctggtcctgttggggatgatctccgggaccgcggcgaatcgctcgtgggcgccggacgcggcgaacctgcagtatgagcagtactggaagctgcacggtggcatggaggcggtcagcaaccgggcggatatgctatctgacaatctgctggcgctgggcgcgcagtatggctggcagctggcggggatgatgctgatgggcgcggcgctgatgcgcagcggctggctgaaggggcagtttagcctgcgtcactaccggcgtaccggcgcgctgctggtggcggccggcatggcggtcaatctgccggcaatattcgcccagtggtatctggcctgggactatcgctggtgcgcgtttttactgcaggcgccgcgcgaacttagcgccccgctgcaggctatcggctatgccgcgctggcctggggctactggccacagctctgccgtttccgcctggtgggcgctatcgcctgcgtcggacgcatggcgctgaccaactacctgctgcagaccctgatctgcaccaccctgttttatcatctcgggctgtttatgcgcttcgatcgtctgcagctgctggcctttgtcccccccatctggaccattaacctccttgtctcatcgctctggctgcgccgcttccgccaggggccggtggaatggctgtggcgtcagttaaccctgcgtgcgtcaggcacatcattgaaagacacatccagataacgatctcgatcacaatcattaacaaaacggatgtaaacgtttccagccgtgtgacctcactcacgcagcggaccgcgggtcgctgccagaatagcctccttgctaagcacaggaggtgaatgtgacgtgctgtaattctcttaaggttgctgagtatgatcaccattcgtgatgtcgcccgccaggcgggcgtttccgtggccaccgtgtcgcgggtgctgaataacagcgcgctggtgagtccggatacgcgcgacgtggtgatgaaagcggtgacccaactgggctaccggcccaacgccaacgcccaggcgctggccacccaggtcagcgataccatcggcgtggtggtgatggacgtctccgacgccttcttcggcgcgctggtgaaagcagtggataccgttgctcagcagcatcagaaatatgtgctgatcggcaacagctatcacgaggcggaaaaagagcgtcacgccatcgaggtgctgatccgtcagcgctgctcggcgctgatcgtccattcgaaagcgctgagcgatgatgaactgagcgactttatgcaacatatcccggggatggtgctgatcaaccgcatcgtgccggggtatgcccatcgctgcgtcggactcgacaacgtcagcggcgcgctgatggccacccgtatgctgctcaatcatggtcaccagcgcatcggctatctctcctcaaaccacggtattgaagatgacgatatgcgccgggaagggtggagcaaagcgctgcaggagcaaggcatcatcgccccggacagctggatcggttccggctccccggatatgcagggcggtgaagcggcgatggtcgaactgctggggcgcaatctcggcctcaccgcggtgtttgcctataacgacagcatggcggccggcgcgctgacgacgctgaaggacaacggcattgtcgtgccgcagcatctgtcgctgattggctttgatgatattcctatttcccgttacaccgatcctcagctcaccaccgtgcgctatccggtaatgtcgatggcaaagctggccaccgagctggcgctgctgggggcggccggcaagctggatcgcgaggcgacgcactgctttatgccgacgctggtgcgccgtcattccgttgcccagcggcaaactgtggggccgatcactaactgacgcgatcgcgggatgtaaccgctttcaatttgtgagtaaattcacagtatattaacattcgcctgattatgatggcagcgtttaccagtctgaaccacgaggtgatggatattcctcactttatttagtaggaacaaggcgttaaacgagttttacagtcgtatttttctggagcgttacccgacacggaagaccgaattttcgtcgtgaaatgcgttgtgcggtaacactaatgcaacaaatcccgcctgcattttctcacaataatgaccctgcataataaaaccggagattccatgaataagaaggtgtttaccctgtctgctgtaatggctggtctgttatttggcgccgccgcacacgcagcagatacccgtatcggcgtgacgatttataaatatgacgacaactttatgtcggtagtgcgtaaggcgattgaaaaagatggcaaatccgcgccagacgtccagctattgatgaatgattcgcagaacgaccagtcgaaacaaaacgatcagattgacgtgctgctggcgaaaggcgtgaaggcgctggcgattaacctggttgacccggccgccgcaggtacggtgattgaaaaggcgcgcgggcagaatattccggtggtgttcttcaacaaagagccttcccgcaaagcgctggatagttatgacaaggcttattacgtcggtaccgactcgaaagagtcggggattattcagggcgatctgatcgccaagcactggaaagccaacccgaactgggatctgaataaagacggtcagatccagtacgttctgctgaaaggcgagccgggccatccggatgcggaagcgcgtaccacttacgttattaaagagctgaatgataaaggtctgaagacccagcagctgcagctggataccgcgatgtgggataccgcccaggcgaaagacaaaatggacgcctggctctccggcccgaatgccaacaagattgaagtggtgatcgctaacaacgacgccatggcgatgggcgcggttgaagcgctgaaagcgcacaacaagagcagcattccggtgttcggcgttgacgccctgccggaagccctggcgctggtgaaatccggcgcgatggccggtactgtgctgaacgatgccaacaaccaggcgaaagcgaccttcgagctggcgaaaaaccttgccgacgggaaagacgccgcggcaggcaccaactggaaaattgacaacaagattgttcgcgtcccctacgtgggcgtcgataaagacaacctgagccagtttaccggcaaataatcgtgatgtgaattgcgggcgtgggttatccacgcccgattattcctgatacagaaccagactcctgctggcgctagtgcgccggacggggcttgcatgaacgcagccaggtataactatggtcagcaataatagcgaacggtcaggcgaatatttgttggagatgagcaacatcaacaaatcgtttcctggcgtcaaggctcttgataatgtcaacctgaaggttcgtccgcactccattcatgcgttaatgggtgagaacggcgccggtaaatcgacattattaaaatgcctttttgggatctatcaaaaagattccggtagcattctttttcagggaaaagagatcgatttccattcggcgaaagaagccctggaaaacggtatttcgatggtgcatcaggaattaaacctggtattacagcgttcggtcatggataacatgtggctcgggcgctatccaactaaaggcatgtttgtcgatcaggacaaaatgtaccgggataccaaggccatttttgatgagctggatattgatatcgatccgcgcgcccgcgtcggtaccttatcggtatctcagatgcagatgattgagatcgcgaaggcgttttcctatgacgccaaaatcgtcatcatggatgagccgacgtcatcgctgacggaaaaagaggtcaaccatctgtttaagatcatccgtaagctgaaagatcgcggctgcggtatcgtctatatctcgcataaaatggaagaaattttccagttgtgcgatgaaataaccatcctgcgcgacggccagtggatcgccacccagccgctggaagggctggatatggataagatcatcgccatgatggtcgggcgttcgcttaaccagcgttttccggatcgcgaaaacactccgggcgaagtgatcctccaggtgcgcaatctcacctcgctgcgccagccctccattcgcgatgtctcctttgacctgcataagggcgaaattctcggtatcgccggcctggtgggcgctaaacgcaccgacatcgtggagaccctgttcggcatccgtgagaaggccagcggcaccatcacgctgcacggcaagaagatcaacaaccacagcgccaacgaggcgattaaccacggttttgcgctggtgaccgaggagcggcgctctaccgggatttacgcctatctggatatcgggtttaactcgctgatctccaatattaagaaatataaaaacagcgtcggcttgctggataactcgcgaatgaagagcgatacccaatgggttattgactcgatgcgcgtcaaaacccccggtcagcatacgcagattggctcgctttccggtggtaaccagcaaaaggtcattataggccgctggctgctgacccagccggagatcctgatgctggatgagccaacgcgcggtatcgacgtcggcgccaagtttgaaatctatcagctgattgccgaactggctaaaaaagacaaagggatcattattatttcttccgaaatgccggaactgctggggattaccgaccgcattctggtgatgagcaacggcctggtcgcgggcattgttgagactaaaaccaccacgcaaaacgaaatactgcgtcttgcgtcattgcacctttaagatcaggggcttcacatgagtgcgttaaataaaaagagttttctcacttacctgaaagagggtgggatatatgttgtccttctggtcctgctggccattattattttccaggatccgacatttttaagtctgctcaacctgagtaatattctgacccagtcctcggtgcgtattattattgccctcggcgtggccggacttatcgtcacgcaggggaccgacctctccgccggccgtcaggtgggtctggcggcggtgattgccgccaccatgctgcaggcggtggataatgccaataaggtattcccggatatggcgaccatgccgatcccgctggtgatcctgctggtgtgcgccatcggggcggtcatcggcctgattaacgggatcgtcattgcctacctgaacgtgacgccgtttattaccactctcggcaccatgatcatcgtctacggcattaactcgctgtactacgacttcgtgggcgcgtcgccgatctccggcttcgacagccacttctcccatttcgcgcaggggtttgtggcgctgggctccttccgcctgtcctacattaccttctacgcgctgattgccgtcttctttgtctggatcctgtggaacaagacgcgctttggcaaaaacattttcgctatcggcggtaacccggaagcggcgaaggtctccggggttaacgtagcgttaaacctgctgatgatctatgccctctccggcgtgttctacgccttcggcggcctgctggaagccggacgtatcggttcggcgaccaataacctcggctttatgtatgaactggacgccatcgccgcctgtgtggtgggcggcgtatcgttcagcggcggggtagggacggtgtttggcgtggtgaccggggtgattatcttcaccgtcatcaactacggcctgacctatatcggcgtcaacccttactggcagtacattattaagggggcgattattatcttcgccgtggcgctggactccctgaaatacgcccgtaagaaataagattgaacgcatcaaaaacccgcgcctggcgcgggtttttttatatctgaaacgaatgcgttgatggaggctacttttctttctgcagctccagcagctgctccggggtgacggccgggtaggattgggcgtcatccggcacgtcatgctgctgcgccggaatcgggatgagagggccgagaaagcgcggttcccgtttgaagatatagaggtccgccagcgcgccaaagcgggcgccgaactcgcgcagccgcacgctccacatatccttcggcgacggcaccgcgtagcactgggcctggatccccatatgcagggcgataaacagcgcccgttcgcagtggaagcgctgggtgatgataatgaagtcgttggtgtcgaacactttccgggtacggacgatcgagtcgagggtacggaaaccggcatagtccagtacgatatccgcgggatcgacgccgcctttaatcaggtcccgacgcatggtcatcggttcattgtagctttgcagagcattatcgccgctcagcaggagatagttgaccttgccgctgttgtaggcgttcagcgcaccctggatgcggtaacggtaatactgattgatgacgccggtgcggtaatatttggcggtgcccagcaccacaccgacctgacggtagggcaggtcctgcagttcatcatagatatagggcgcggttttccagctcatccagcggtcaaggcccagcacggtcaacagcagcaggccgagcaggactaacaggctgtagaacgcacgctttaacatgaacttggctcaataatagacaacggagtcttcaggctactttacccgccgggtaagcgcaagaaacccgcgtttgattgcggggattttcagcaatatagacagatcgccgaatgcaggccgggtaaggcgtgagccgacacccggcatagggatcttcaggtcgccatggcgcgaaccgtaggtcgggtaagcgtagcgccacccgacacctaacggtataaaaagtcggccggataagccgaagacgccgtccggcaatctgctcaggctgatcaacctaacaggacgcgctcaatattgtggcagcccagcgccttcagggtggcgacggtggcatcccactggatcagcgccgcgtcggctttctccgccaggattgcccgctggatagcgggataatcatagccgttgaggctcaggagattcagcgccccctgcagcggcggcagcgtcgggttgaacgctgcgttttccgcatagctaccgctgaaaatggtaccgtctttcagctccagcgccacgccggaaggcgagtggctatagggcgcatggcagcggttggcggcctgaatagctgcctgggttagggcatcgccgctgaccgggaagccatggtcctgttcatccatcagcagggttttgatctccaggtctttcgggccaaaggcgtccggcagatagtgctccagggcatgcgcttcgcgacccggcagatgaatgcgcagcgccagcccgctgttcagttcgttcataaactgacggcaatgaccgcacggcgtgtagttcaccgtgatagcgcgcagggaggtctcgccgcgcagccaggcgtggctgatggcgctctgttccgcgtgaacggtctgctgcatggtagcgccgagaaactccatattgccgccaaagtaccagcggccgctgacgccgcgggcgatagccccgacgttaaaatgagaaaggtcggggcgcgcgcaggcagcggcaagcggcagtagcgcaaaagccagcgcgtcttcgtccagacctgtcgcatgctgcagcgtcgccacctgatcggcttcgagcagcgccgggaaatgcgggtcggtgagcatcggggcgatggccgcctgcagatctgctgccagagtcgtcaaagcagcttgaaaacgtgagtgcatagcgttgcctcataacagtgtaatgggaagccagtgtacgggcggccagcggttccatatgtgatgaatatctcattctttatgcaactccgatttgttgcattaaaaaatgtgattcaaatcactattaacctaccactgcgaggatcagcggaaataagaacggcgccatcaacgaggtgatgatcccgcacagcaccagcgccagtgagctaaacgcgccttcctgatagtccagctcggcgcagcgggcggtgccgagggcgtgcgaggcggtgcccattgacaggccgcgcgacgctttggtgcgaatgcgcatcaggttaagcaacgtatgcccaaataccgcgccgaggatgccgacaaaaattacgcacacggcgctgatggccggaatgccgccgatgctgccgctaaccgccatagcaatcggcgtagtgactgacttaggcagaatagaggcggcgatttgcggcgtggcgcccatcagcagagcgacggtggtgccggtgatcatcgccacgcagctgccgataaagcagatggtaatgatagatttccagcgggcgcggatctggtgcagctgttcatacagcgggaacgcaagggccactaccgccggctgcagcagatcgttcaggactttgctgccggcaaaataacgctcataggagatcccggtcagcagaagaaatggaataatcaccaccatcgccaccagcagcgggttgagcagcgggaacttaaagcgggccgccagtttgcgggcgagaaaaaagacgatcagggttagcggtagcgaccaccagatttcatgcatcattcttcttttcctttttggccaatcactttacgttcgccatgcaccaaatgggagctccagctcaccactacaaacaccaccagcgtactgatggcgcaggagataacgacaggccccagctgggcgcgcagcagatcccagtactgcatcaccccaacgccgatcggcacgaacagcagcgccatatagcggatcaggatattgcagccggggttgacccattgcggcggcataatttgcagcgccagcagtacgaagaggatcagcatgccgatgatgctgccggggatagtgataggcagcagcccggcgataaaaattccggcgtacaggcaggcgtaaatcaggacgaaagcccgcaggtactgccagataatagtcagcgatttactcatggtaataacccttgatgaagtgcattcatcatacaattaatccctaaaatgtgctaccgatcacatcatgaattctatgcatagcgctgatagcttacgggaaccatagtctcacccgtcagggcccgacaccttgcggctcaggcgggagcgctcaccacgctatcttgctggatgaggcgcggcaaataaaggcgaatgggacgccacagacccctgtaaagcatagagattatctcgccgctttgccgcatcgagcgtgcggggtacggcgtgcgtctggtccgacgcattgagcgctttcaaccagcgcccggaggcgctaccatagcgcctctttttattccgggtaacgatatgcgtgttctactggcgccgatggaaggcgtgctcgattcgctggtgcgcgagctgctgaccgaggttaacgattacgatctctgcatcaccgaatttctgcgcgtggtggatcaactgctgccggtaaaatcgttctacaggctatgcccggaactgcatcaccagagccgcacgccgtccggaacccgcgtacgcgtccagctgctgggacaatatcccgagtggctggcggaaaatgccgcccgcgcggtggcgctgggttcatggggggtggatttaaactgcggctgtccgtcgaagctggtaaacggcagcggcggcggggcaacgctgctgaaagatccggagttgatctatcgcggcgcgaaagccatgcgagaggcggttcccgagcatctgccggtgacggtgaaagttcgtcttggctgggacagcggtgaacggcgctttgaaatcgccgacgcggtgcagcaggcgggggccagcgaactggtggttcacggccgtaccaaagaagatggctacaaagccgaacgcatcaactggcaggcgatcggcgagatccgccagcgcctgactatcccggtggtcgccaacggtgaaatctgggactggcaaagcgcccaggattgtatggctgtcaccggctgcgattcggtgatgattggccgcggggcgctcaatgtgccgaacctcagccgggtgatcaaatacaatgaaccgcgcatgccgtggccgcaggtggtccagctgttgcaaaaatatacccgcctggaaaagcagggtgataccggtctgtatcatgtggcgagaattaagcagtggttaggctatttacgcaaggaatataccgaggcgctgaccctgtttaatgaaattcgcgccctgcaaacgtctgctgaaatagcggcggcgatcggccgctattaaccgccatactgttattcgcttcacatattattacttgcatgcctattgatgataggcatgggttgaataaagtgataatgtgcggtcaatcaattcaggattgctactgaactcaggcaaaacctaagcactttcgtcattcgtggcgcaaagtgcttaggtttttttttggtaaaaattcagggtggataaaatgatgatgtaaaacaatgagatgtgataacgatttctctggcattgtcgcggttttattaccgacggacgctttttgccattcatttttaaaaaaagaaaacgggtaaataaatagcctggggatcccctttgtttttattcagtcacggtggatatcacaatgcataacaaaaaaataaatcagcttttgatcggcgctatgctggcggccatggcgcctgccgtgagcgccgcggacatcccggcgtggaacggcagcgcgctggggtttgaagccgggcagcaagggctgctgggcgatatgctaggcattcgtccgatccttgaagaaaacggctttcattataatctcggctatcttaacgagatggcctacaacgccggcggcggttatgaccatgataaacacctggcctatattgaccaggtggcgctgacctttacccaggatctggagcgctggaccggcataccggatgcgcgtctcgaaggcaacatcgtcaaccgcaaccacgatgataatctcaccacgaaacggctgcaggatccgcgggtgagtttcaacgatctatcgcaggagagctggggcggcgggtcgattacccgccttggctggctcacctttgcccgcagctttgacgaccgccgcctgacctggcgcatcggcatgatgaacaaggtgcaaaccttcgaccagatcataccctgcgattttcagctgctgacccagtgcggtgggaaatcggccaactcgctgacctggaataactggaacattcatacctggggcaccaccctggagtacaagctgacgccgacggtcaccctgaaaggcggagtgatggagcaaaacccgcaggctaccgcgcgcagccacgcgtggagctggtcgacgaagggtagcaaaggcatcttactgccgatggagatcgaaacccgtccgctgattaatggcctgccgggagcctataaccttggcgtggtctggactaacgcgccgcagagcgacctctacagcggtaaatccggcggcgccggggcgaccgatccgcaaggttacgccgagcacgacagcacctggtttatgtacgccggcctgaaccagcagatcacccgccacgccgacgacccgctgcgggggatgagcgtctcactgagcggcagcctcagcgaccagcgcagcaactatatccactccgccgtcgccgcctccatgcgctaccgcggtctgtttgacgcccgcccggaggactggattggcttcggcctgacgtggatcgacatgagcagccactacgcacgtaatcagcgctatatgaatcagataagcggcgccaccgactataacgatccggcttacctgccggtggccggtcattcgctgaacggtgagctctattatcgcttccgcccggtctcctggctggagctgcagccgggcctgcagtactggcaccgtccgggcggcgtcgcgcagacccaggacgcgtgggtagtggagtggaaaaccgtcgtgaccttctgatagtcgcgatcttaatcacgttttttcacttgtcaggttgagcgcgcagcagaagttgttacagtgcgggtgttggattgcaactgctgcggcaggcaaaacctgatcacctggcgtttcgtcgggggtcaggtttttttgtttctggggtctatatgcaaatcgccaaagtactcaataacaatgtggtggtggttctcgacgagcaccggcgcgaacaggtggtgatggggcgagggctggcctttcagaaacgcccgggcgacgtgctggacgacagtaaaattgaaaaagttttcgccttacaaagcgatgagctggtcggccgcttaggcgagctgctcagtcaaataccgttagaagtgatgaccacctgcgatcgcattatcgacctggcacgcggacggctgggcaagttacaggaaagtttgtacatcacgttaacggatcactgtcattttgctatcgagcggcagaaaaagggcatcgcactgcgtaacgtgctgctgtgggagattaagcggctgtatccgaaggagttcgcgctgggccaggaggcaagggccatcattgccaaaaggctcggcgtggagttggcggaggacgaagccggatttatcgccctgcatctggtgacggcgcagctcaacagcgaaatgccggaggtcatgcacgtgacccgggtgatgcaggagatcctgcagctggtgaagtatcagctgcagcttaactacgatgaagagtcgctgagctatcagcgtttcgtcacccacctgaagtttttcgcccagcggatgctgacgcgcacggtggtggaagatgacgacgtctcgctgcacagcgcggtgaaagataactacgccaaagcgtggaagtgtgcggaaacggtggcgacgcatctgcaaaagcagtatcagcggtcgctgaccaccgaagaaattatgtttcttgccattcatatcgaacgggtaagaaaagaggggcgttaattctccccaacaaaactggattgttactgcatgatgcaggcaaaacctgagcgcgacgcccaccggcgtggttctcgggtttttttattttttactactcagtcgccggttgtctgcgggcagcggcagtaaggaaaagagcatggaatataaagcactcgcgcaggatattctcaaccgcgtcggcggcaaagagaacattgtgagtctggttcactgtgcgacacgtctgcgttttaaactgaaggataacggcaaagccgatgccgaagggctgaaggccaatccgggcgtgattatggtggtggagagcggcggccagtttcaggtggtgattggcaaccacgttcacgacgtctggctggcggtgcgccaggaggcggggttaagcgatgacaacgaaccggttgccgaggaaaaagcggccaaaggatcggtgttaagccagcttatcgacatcatctccggcatctttacaccgtttatcggcgtgatggcggcaaccggtctgctgaaaggcctgctggcgctggcggtgacctgcggctggcttacgccggagcaggggacttataaaatctggtttgccgccagcgacgcgctgttctttttcttcccgctgtttcttggctataccgccgggaagaagtttggcggcaacccgtttatctcgatggtgattggcggggcgttaacccacccgctgatgattcaggcctttgaggccagccaggcgccgggcgcggcggtggagcactttctcggcattccggtgacctttatcaactacagctcatcagtgatcccgattattctcgcctcatgggtctcctgctggttggagcgcaagagcaatgcgctgttgccgtcatcgatgaaaaacttcttcagcccggcgatctgcctggcggtggtggtcccgctcaccttcctggtgattggcccggtcgccacctggctgagccatctgctggccaacggctaccagttcatttatgcgtttgccccatggctggcgggcgcggtactgggcgccatgtggcaggtgtgcgttattttcggcctgcactgggggctggtgccgttgatgatcaacaacatgacggtacttggtcacgactccatgctgccgattattcttccggcggtgattgcccaggtgggggcggttctggggattttgctggccacccgcgatgcgcgtcagcggatgctggccggttccgccttctctgcggggctgtttggcatcaccgagccggctatctatggtctgaccctgccgctgcgtcgtccgtttatcttcggctgtatcgccggcgccatcggcggggcgatcaccgccttcagtaatagtcatgcttactcgttcggcgtgccgaatatctttttcccggcgcagatgatcccgcccggcgggattgacgccagcgtctggggcgggcttatcggcaccggcgtggctttcgtgctcgcctgcgtgctgaccttcttcgccggcctgccgcgcgccagcgctgcaccgggcgccgtgacggtagccccggcctcggcaaacgatattctggcgccgatgagcggcagcgttatcgccctcgagcaggtgccggatagcaccttcgccagcggcctgctgggtaaaggggtcgccattatcccggcggtgggccaagtgattgccccgttcccgggcgaagtggcctccctgtttcagactaaacacgccatcggcctgcaaagcgacagcggcattgagctgctgatccacgtcggcatcgacacggtcaaactcgacggcgtgccctttaccgcgcatgtgaaagagggcgacagggtacaggccggcgatctgctgattgagtttgatcgccaggcgattctggacgccggctacgacctggcgaccccgatcattatcagcaacagcgacgactaccgggagattgacacggtggcgtccagcgccgtcgaagccggtcagccgctgttgtcagtcagccattaatcacaggagaaagagatgaaaacattcccggcggattttttgtggggcggcgcgaccgcggccaatcaggtggaaggtgcttatctggaagatggcaaaggcttatccacctccgatgtacagccgcacggcgtgttcggcgaagtggtcgagcgcgtacccggcgacagcggcataaaagatgtggcgatcgatttttaccatcgctatccggaagatattgccctgtttgccgagatgggctttaactgcctgcgagtctccatcgcctggacccgcatctaccccaacggcgacgacgccgagccgaacgaagccggcctcgcgttctacgacaagctgttcgacgagatggcgaagcacaacatcaccccgctggtgacgctgtcgcattatgaaatgccatgggcgctggtaaaaaactacggcggctggggcagccgggaggtgattggcttctttgagcgctacgcccggacggtgttcagccgctataaaaataaggtcaaactgtggctgacctttaacgaaatcaatatgtcgctacatgccccgatgaccggcgtcggcctgccggccggcagcagcaaaggcgaagtgtatcaggcgattcaccaccagctggtggccagcgcgctggcggtcaaagcctgtcatgagctggtgcctgagggcaaaatcggcaatatgctgctcggcgggctgatgtatcccctgagctgcaaaccggaggatgtgtttgagacgctgcaggagaaccgcagctggcagttcttcggcgacgtacaggcgcgcggcgcgtacccgggctatatgcagcgctatttccgtgacaacggcatcacgctcaccatcaccgacgccgatcgtgaagcgctaaaaaccaccgtcgactttatctccttcagctactacatgaccggctgcgtcaccgccgacgaggcgctgaaccagcaggctcgcggcaatattctcagcatggtgccgaacccgcacctggcgagctcggagtggggctggcagatagacccgctgggcctgcgcacgctgctgaacatgctgtgggatcgctaccagaagccgctgtttatcgtggaaaatggtctgggcgccaaagataaggtggaagccgacggcagcattaacgatgactaccgcatcagttacctgaacgaccacctggtgcaggcgcgggaagccattgacgatggcgttgagctgatgggctttaccagctggggaccgattgacctggtgagcgcctcaaaggcggagctgtcgaagcgctacggctttatctatgtcgaccgccatgatgacggtaccggcaccctggcgcgcagtaagaagaagagctttggctggtataaagaggtgattgccagccgcggcgccagcctgaaagcctaaaggatgcccgcccggccatcgccgggcgggagattagccggtttacgcgcgcgcagtaaaaaggtcatcggaggttctttctcttcatccagagcgggcagggtggaaaagaggtgcggctcgttaaaagatgccggcttatattcatcccttgaattgataaggttgtttatttttagcaaactaataatttagtcacacgctttactaaacgcgtttaattcaattaacttatgataaccaacctgattaagttatctgacctgtccaatgaaattgatattaaataaaagcgtgctggcggcattgcccctggccatcgcgctggctggctgcgcgccatctcatgaggttgctaatccgccgcagcagcaaattccagcctcccatgtttccatggatctccctgccgccgtgaaaaatggctggccgcagactgactggtggaaagattaccatgacccacagcttaataatctgattcagcgagcgttggccaacgcgccggatatgcagattgccgaacagcgcatcaggcttgccgaagcgcaggcgcgaatgtcgcaggcgaatcttggcccggagatggatttctccgccgatattgaacgccagcgcatgtcggccgaaggcctgatgggaccgtttgctaccgacaccgacggcaataccggcccgtggtacaccaacggtacctttggcctgaccgctggttgggatctggacctgtggggcaaaaaccgtgcgctggtgaaagcgcgtatcggcgagctgaaagcccaggttgctgaacaggcccagacccgtgagctgctctccggcagcgtggcgcgtctgtactggcagtggcagacggaagcggcgatcaaagcggtgctgcagcaggtgaaaaacgagcaaaataatatcgtgacggtcgacaaggccctgtatcagcgcgggatcactaactccgccgaaggggcggagaacgatattaacgtcagcaaaaccgaccagcagctggcggacgtgacgggcacgatgaaagagattgaagcgcggctgatggccctgaccaacagccagagccagtcgctaaacctcaaacccgcaagcctgccaacggtcagcgcgcagctgccagataccctcggctatgagctgctggcgcgccgcccggatctgcaggtcgcccactggtatattgaagcgtccctgagcgaagtggacgcggcgaaagcggcgttttatccggacatcaatctgatggcgttcctgcagcaggatgccctgcacttaagcgatcttttccgccattcggcgcagcagatgggcgttactgccgggctgacgctgccgatctttgacagcggccgccttaacgccaacctggatatcgccagcgcgcagaatagcctgtcgatcgcccaggacaacaaagcggtggtggatgccgttaaccaggtggcgaaaaccgccagccaggtcgaaacattaatggccaaaagccagcagcagcagcaggttgaaaaagacgctcagcgggtagtggatctggcgcaggcccgaatggcggcggggatcttacctggctccagagtcagtatggcgaagctcccggcgctgcaggagcggatcaccgcattgcgcctgcacggccagtggattgacgccagcattcaactgacctcggccctcggcggcggctaccaccagacggtgaagtaaccgccaaccacggtgcgcccgcgggcgcgccgcttaatctttcttcttactctcgcgccgcctgagccaccagtgggcggccaccaccaccaccactgcgaggatcagccagatccagtgcttcagatgggcgtccagatggtgcagccacgggccaaccacctcgccgccgagatagccaatggtggtaaacagcagggcccacaccagcgctccgacaatattcagcggcaggaaaatgcgcggcggcaggcggctggcgccgatcagcagggggccgattacccggaagccatacataaagcgggtgccgatgacaaacagccacggccggtgctggatcatacgctgcgctttacggatccgcgctttctgactggcgaaacggcgcaggatgcgtcccccgaagcggcgaccgaccagatagagcagctgatcgccaatcatcccgccgagggcgacggcgatcaccaccaggggaaatttcagtagcccctgatgcgccgcgacgccgcccagcagggtaatggtctcaccttccgccatgctgccgacgatcagcgccgcgtagccatactgggaaatcaggtgattgatatccataaaaagcttttctccttacctcatcacctcttaatcatacaccctgctgaccaaaacgcggcgacgcagaattttctgtgctgtacataaaataatctacagggtgaattatacttggatcagtgcagtacgaagccgtgacaagggggacgctatgaaccatgtctgggggctcttcgctcatcccaaccgggaaatgagcgtgattaagagcgagaatgaaaccatttctcatcactatacgcatcatgtgctgctgatggcggcggttccggtaatctgcgcctttatcggcaccacgcagctgggctggaacttcggcgatggcaccgtgattaaactgtcgatgctgaccggactggcgctggcggtgctgttttacgccgtgatgctcgccggggtggcgatcatggggcgggtcatctggtggatggcgaggcagtatccgcagcagccttccctgaaacgctgcatggtgtttgccggctacgtcgccaccccgctgtttctgagcgggattgtggcgctctatccgctggtctggctgtgcgcgctggtcggtactattgcgctgttctataccgggtatctgctgtatctcggcattccgaccttcctgagcattaatcgggaagaggggttaagctttgccagctcgacgctagctattggggtactggtgctggaagtgctgctggccatcaccgtggtgctctgggggtatggctaccgactcttctgatcgggcggcacgggtaaatatgcattgccggcaaatatgtattttatgtcggcaatgcagcatttcttcacgattcttattaggcacagggccttacggcgcggtatgatggcgtttgccagcgaagttgcccacttaacctcgcggcgtacgttccataacgtgcaaaaatacttttcagaatgcccatgatgccgaaatttcgagtctctttgctcagcctgaccttgctgctggctgtgccttttgcgccccaggcgttagcaaaaaccccgacggcggtgaccgcctcgcagccggaaattgcctccggcagcgccatgatcgtcgatctggccacgaaaaaaatcatttatgccagccagcctgatctggtgcgcccgatggcgtcgatcaccaaagtgatgaccgccatggtggtgctcgatgcccatctgccgctggatgagatgctgacggtggatatcagccatacgccggaaatgaaggggatctactcccgcgtgcgcctcaacagccagattagtcgccgcgatatgctgctgctggcgctgatgtcttccgagaaccgcgcggccgccagcctggcgcatcactatccgggcggctacgacgcttttattcgcgcgatgaacgccaaagcccaggcgctgggcatgacccatacccgctacgtggagcccaccggcctgtcggtgcataacgtctccaccgcccgcgatctgaccaaactgctgatcgccagcgagcagtatccgctgatcggccagctgagcaccaccaaagaagagaccgccaccttcgcccatccggcctacagcctgccgttccgcaacaccaaccatctggtgtatcgcgataactggaacattcagctgaccaaaaccggcttcaccaacgctgccggccactgcctgattatgcgcacggtgattaaccaacgtccggtggcgctggtggtgatggatgccttcggcaaatatacccacttcgctgacgccagccgcttgcggacctggattgaaaccgggaaggtgatgccggtacccgcctcggcgctgagctataaaaagcagcgcgaagcgcagatggcggaggcgatgctgaaaggcggcgcgcagaccgcgcagaacgattaatctgcatgtctcccggatggcggcgcattgcgccttatccgggctacgtgatttggcgccgggttcgcccctttcgcaggcccggcaagcgcagaggccgagtgccggtgtttgtgcaggatggcggctgacgcttctacggaaccgcgctgaacggtagcccggctaaggcgtttacgccgcgagccggggatttggcgccggatatcactccggcagcgtccagtcgccgtcacccagcgcgcgctgcataatcaacgtatcccgccagtcgcccatcttgtagccgacgctgcgcagctgacccgccacggtaaagccgaactttttatggatcgccagcgagccggcattgttatggccatcgccgatgatcgccagcatctgccgccacgggcctttctcgcactcagcgattagcctggacagcagcgcgctgccgatgccgcgtccgcccattccggattccacgtatatcgattcctcgagggtgtagcgataggccggacgcgggcgatagaaggtggcatagcagtagccgacgatagccccgcgccacagcgctaccagccacggcagcccgttgtcgcgcacggtctggatccgtttacgcatttcgtcaacggtgggggggatctcttcgaaggaggcgcggccattaagcacgtgccagacatacagcgcggcgatggcgtgcgcatcgtcgggcagcgcttcgcgaatttctaaatcactgtcgagtaacggggcctctgcgggcatggcggcgctcctgaatctgccggagaaacattctccggcgtgcagcgtaatacagaagcgccaggctgaatagtcctgccgtcgattattgcggatccgccggagaggctggcgtcggggccgcttcaccccagtatttctgcttgctggttttaccaatccccgggttcatgctgttggtgggatcgttctggcgatagaactgctgcaggctctccggggcctcatacagatgacccacgttatgctccgccgggtactgggcgccgcgcgctttcagtaactccagcattttttccttcagcgcgtgggcgtcgacccctttcctgacgatgtaatcctgatggaacacatggcacataaagtggccatagtagagcttatgcaccagctggctgtcgatttcgggcggcagatgttcgaaccactcggtatcgttacggcgcagggcgatatccagcgccagaatatcttcgacttcgtcggcatgcaccgcctgatagcggattgccgcgccggcggcggcaaagcgatggaggaacgccttgctgccttcctccggcgtacaggcgaagaaatccccctcggcctgctggaagtactccgtcaaccaacgctgcgcttcttcgatgccgtcgccagccatcttcagcagcagatgatgttcatatttatcacgccaggttttcatccgctccggtaaatgcgccgggaagacgtggccgagcttctgcataaagcggtcggtaaagtgcggcttaaacagcgagactttctccagcatcgcgtcggtgcgccccttcatggtgaagaagaacggcattttgtcggtgccgagcttgtcgatcatcaggaaggtgtctttgccatacttctcggcgatatcgtaaatatcgcggtgcatatattcccccgccaccggcagatgctggaactcggcgaggatatggcggcggatctcggtcaatacctgcggctggttggtgccaatgtaaaacacctgctggcgcttttccgccgggaaagtatcgagacgcacggcgaaaaccgccagcttgccggcgcagccggaggattcgaacaggcggtccgggtcggcgttatagcgcgccggggtgtcggcatcgacatcgcgcacgcgggtgacatagtcgtgatcgtgggcgtggcggccgtcgtgcaggacatcgctatcgctaatccgttcgtcatcgaggcggctgaggatctgctccggcgtgctgccgagatcgatgcccagatgattgaccagcttcagcttgccgtcggcgtcaatctgcgcgaacagcgacatctcagtgtaggccggcccgcgctgcaccagcgagccgccggagttgttgcagatcccgccgatgaccgacgcgccgatgcatgacgaaccgatcaccgagtgcggttcgcgtcccagcggtttgagcgctttttccagcgaatagagggtggtgccgggccaggccagcacctgctcgcctttgtccagcagatgcagtttgtccaggcgcagggtgctgataatcacgatctcgcgatcgtaatcattgccgttgggggtcgaaccttcggtcaggccggtgttggccgcctgcatcagaataattttatcggcgtctacgcaggcgttgagcacgcgccagagctccagcagggtaccgggaaagacaaccgccagggcctcgccctgaccggagcggaagcctttgcggtagcgctgggtttttgccgggtcggtcagcagatgcgaagggccaaccaggcgcgccaggtcagccagaaacgttttatgggtgtcagtgggtgcagatgacatgttccactccttgtggtggtgcgcgaaatatcgaggataagcatagcgctttgtatgacaatttgatgcatgaatgtttcgcaaaaatcagagaagaaccttagcattctgcgggcgcgttgtttatatatatggcaaactgcggtttttattatgttttaccgagtccccgtctgagataaagcgagataacaatgaaatggctctgcactgtaggcgtcgccgtgagtctggcgctgcaacccgcgctggcggatgaactgtttggtaaccaccccctgaccccgcaggcgcgggatgcctttgtcaccgacctgctgaaaaaaatgacggtggacgagaaaatcggccagctgcgtctgataagcgttggcccggataacccgaaagaggcgatccgtgaaatgatcaagaacggtcaggtgggggcgatttttaacaccgttacccgcccggatatccgtgtgatgcaggatcaggtgatgcagcttagccgcctgaagatcccgctgttctttgcctacgatgtgctgcacggtcagcgcaccgtgtttccgataagcctcggcctggcctcgtcgtttaaccttgatgcggtgaagaccgtgggccgcgtgtcagcttatgaagccgccgatgacggcttgaacatgacctgggcgccgatggtcgacgtctcccgcgacccgcgctggggacgcgcttccgaagggttcggggaagacacctatctgaccacgatgatgggccaggcgatggtggagtcgatgcagggcaagagcccggcggaccgctattcggtgatgaccagcgtcaagcatttcgccgcctacggcgcggtggagggcgggaaagagtacaatacggtcgacatgagcccgcagcgcctgttcaacgactatatgccgccgtataaagccgggcttgatgccggcagcggcgcggtgatggtagccctgaactcgctgaacggcaccccggcgacctctgattcctggctgctgaaagacgtcctgcgcgaccagtggggctttaaaggcatcaccgtttccgaccacggcgccatcaaagagttgattaagcacggcgtggcctccgacccggaagacgcggtgcgcgtagcgctgaagtccggcatcaacatgagcatgagcgacgagtattacagcaagtacctgccggggctggtgaagtccggcaaggtgaccatggccgagctggatgatgccacccgacacgtgctcaacgtgaaatatgatatgggactgttcaacgatccctacagccacctgggaccgaaagattctgacccgcaggacaccaatgcggaaagtcgtctgcatcgtaaagaggcgcgcgaagtggctcgcgagagcctggtgctgctgaagaaccgtcttgatacgctgccgctgaaaaaatccggcactatcgcggtggtgggcgcgctggcggacagcaagcgcgacatgatgggcagctggtccgcggccggggtggccgaccagtcggtgaccgtcctgaccggcatcaaagaagcgctgggcgataacggcaaagtgatttacgccaaaggggcgaacgttaccgatgacaaaggcattgtcgatttcctcaatttgtatgagaacgcggtgcaggttgacccacgctcgccgcaggaaatgatcgacgaagcggtcgcggcggcgaagcaatccgatgtggtggtcgccgtggtgggcgaggcgcagggcatggcgcatgaggcctccagccggaccgatatcaccctgccgcagagccagcgcaatctgattgccgctcttaaagccaccggcaaaccgctggtgctggtgctgatgaacgggcgtccgctggcgctggtgaaagaggatcagcaagccgatgcgctgctggagacctggtttgctggcaccgaaggcggccacgccatcgccgacgtgctgtttggcgactacaacccgtcgggcaagctgccgatgtctttcccgcgctcggtggggcagatcccaacctactacagccacctgaataccggccggccgtataatccggagaagccgaacaagtacacctcgcgttacttcgatgaagccaatggcccgctgtatccgtttggttacggtctgagctacaccacctttagcgtctccgatgtcaacatgtcgtcggccaccatgccgcgcgatggcagcgtgaccgccagcgtgcaggtgaccaacaccggcaatcgcgaaggggcgacggtgatccagctctacctgcaggacgtcaccgcctccatgagccggccggtgaaaatgctgcgcggctttaaaaaggtcaccctcaaaccgggcgaaacgcaaaccgttagcttcccaatcgacgtcgacgcgctgaagttctggaatcagcaaatgaaatacgttgctgagccgggcaaattcaatgtctttatcggcgtggactcagcccgcgtgaagcagagcgagtttgagctgctgtaaggcatcgctcttaagtccaacgtcacgctttaaaggccgattaatcggccttttctttttcgcatcgctggcaaatgggctacgcttttctcttaagcttctgtaagcgaagcgcaaaagaactgagggaagcgggatgaagatggcaacgacatggtccggcgcgctggcgctggccgccctgataagtttaccgctgcaggcggcggagccggtgaaggtcggctcgaaaattgataccgaaggcgcgctgctgggcaatatgatccagcaggtgctggaaagccacggcgtaaaaacgattaataaaatccagctcggcaccacgccggtggtgcgcggggcgattgtcgccggcgagctggatatctacccggaatataccggcaatggcgccttcttcttcaaagatgaaaacgacccggcgtggaagaatgcccaacagggctatgagaaggtgaagcgcctcgatcaggagaaacatcagctggtatggctcaccccggcgccggccaacaacacctggactatcgccgtgcgccaggacctggcggagaaaaataagctgacctcgctggccgacctcagtcgctacctgaagcagggcggcgaatttaagctggcggcttcggcggaatttattgagcgcccggacgcgctgccggcgtttgaaaaagcgtatggcttcaacctcaaccagaaccagctgctgtcgctggccgggggcgatacggcggtgaccatcaaagcggcggcgcaacagacctccggcgttaacgcggcgatggcctacggcaccgatggcccggtggcggccctggggttacagacgctgagcgacccgcagggcgtgcagccgatatatgccccgacgccggtggtgcgcgaggcggtgctcaaggcctacccgcagatcgccgactggctgcagccggtcttcgccagcctcgatgaaaaaacgctgcagcagctgaacgctcgcattgcggtggagggccaggatgcgaagcgcgtggcggcagattatctgcagcagaaaggcctgctgaagtaagccaccggtgaccattcgctgtactcaccgcgtcggcctgctgctgacaggtctgctgctggttacgctggcgctgccgtttattacttacgcgccgaatcgcttactctccggggaagggcgcgggctgtggcaggtaatgccctggctcgccggcgttcagctggcggcggcccttgccgggatgctgctttgctggctgccaggcagggccgcgccgcttcttcacctgctgctggccgaactgctcttcccgctgcttatctggggcagcggccaggcggcgcttgagctctcccgccacggctcgccgctggcgcgcacctcgcccggcagcggcctgtggttgtcgctggcgctttgtctgctgctggccagcgaggccatccgtcatcttaccgtccggccgctctggcgctggctgctcaatgcgcaagtctggctgttgcccatcatcctgctcgctatcggggcgctcgatcagctctcattgctgaaggagtatgccaaccgtcaggaggtatttgatgacgccctgcgccagcatctgcttctgctgttcggcaccctgctgccgggcctgctgattggcctgccgctgggggtatggctgtggcggcgtccgcgctggcaggcgccggctttcaccgcgctcaatgtgatccagactattccgtcggtagcgctttttggcctgctgattgcgccgcttgccggtctggcgcgttatttcccgacgctgggcgagctgggcgtctccgggaccggcgtggcgccagccctgatcgctctcactctctatgcgctgctgccgctggtgcgcggggtggtgaccggcctgcagcaggtgccgcaggatgccctggaaagcgcgacggcaatgggcatgagcgccgggcagcgctttcgtcaggtgcagcttccgctggcgatgccggtactgctgcgcagcctgcgggtggtcagcgtgcaaaccgtcggcatggcggtagtggccgcgctgatcggcgccggcggctttggcgcgctggtttttcaggggctgctgagcagtgcgctggatctggtgctgctgggcgtggtgccgaccattgccctggcggtggtggtggatgccctgttcgccctgtggggcgcctggctaaaaggagaggccaatgattgaatttcaaggggtcagcaaagtgtttgccggccacccggcggtgaaggacctgaccctggagctgcgcgaaggcgctttctcggtgctggtggggacttccggctcgggcaagtcgacgacgctgaagatgatcaaccgtctgctggagccggaccggggcactattcgctttgccggcgaggacatccgcctgcagccggtcctgaccctgcggcggcggatgggttatgccatccagtccatcggcctgtttccccactggacggtggcgcagaatatcgccaccgtgccgcagctgcaaagatggccgcgggcaaggatcgccgaccggatcgacgagctgatggcgctgctggggctggaggcgacgctgcgcgaccgttacccgcatcagctctccggcggtcagcagcagcgggtgggggtggcgcgggcgctggcggcagatccggaggtgctgttgatggatgagcccttcggcgccctcgacccggtgacccgcgaggcgctgcagcaggagatgctgcgcatccaccgtctgctgggacggacaattgtgctggtgacccatgatattgacgaagcgctgcgtctggcggaccacctggtgctgatggacgggggcgaggtggtccagcagggggcgccgctggagatgctcctgcgaccgaaaaatagctttgtacagaccttttttggccgcagcgagctgggtgtgcgcctgctgtcgctgcgcgaggtgggggactatttgcgtcccgacgaacggctggcgggcgaggggctgaccgtcaccatgaccctgcgggaagcgctgtcgcagtttgtcgcccggcgctgcgagacgctgccggtggtcgatgccgaaggcaggccctgcggtacgctgcattttgccgatctgctgcgccaggagatgagccatgaaggcgcttcgtgagccgctgtggtggcttatcgcgctgtttatcggcttgctggcagggctgccctacagcgcgccgctgttcagtcggctgttcccggaactgccgcggccggtctaccagcaggagagcttctgggcgctcactctcgatcacggctggctggtggtggcgtccagcctcgcggcaacggcaatcgggctgggggcaggggtggcggtcacccggcccgccggcagcgcgtttcgtccgctggtggagaccatcgccgctatcggtcagacctttccgccggtggcggtgctggcgatggcggtgccggtgctgggctttggctggctgcccgcgctcatcgccctcgcgctgtatggcatactgccggtgctgcaggggacgctggccgggctgggttcgataccgcctggggtgtcaggtgtggctgaagggatgggaatgaccggctggcagcgtctgtataaggtggagcttccgctggcggccccggtgatcctggcggggatccgcacctcggtcatcgtcaatattggtaccgcgaccattgcctcgacggtgggggccagtacgctcgggacgccgatcatcatcggcctgagcggctttaataccgcctatattgttcagggggcgctgctggtggccctggcggcgattatcgtcgaccgcgcgtttgagcgtctgacccgctggatcagccgacaccgccacgcacaataaaggaatagccggccagcattacgccgctgatcccgccgatggccataagtaagaagagggtgacgaccgcgattttcgctggcttcataataggctcctgatgttaacaaggggattatacggtgaagcgcaggtgttaatgaaacattaattgcggtttagcgccgcgccggggtttttgccgcgtttgctgcgcaacgcgccgcaaaaaagtgtgatcctggccgtcgtttttcatttttatgcagggcttcaaagaaagttttcgccaggcagggtatggtacgcgctttcaggcatgtgtggtttgcgggtatgtacgagtttgatctggtgttgctgctgcttcagcagatgtgcgtatttttggtcatcgcgtggttgatgagcaaaacccgactgtttatccccctgatgcaagtcaccgttcgcctgccgcacaagctgctgtgctacgtcactttctccattttctgcattatggggacctatttcggtctgcatatcgaagactccatcgccaacacccgcgccatcggcgccgtgatgggcggcctgctcggcgggccggtggtcggcgggctggtagggctcaccggcggcctgcaccgctactcgctggggggaatgaccgccttaagctgcatggtttccaccatcgttgaggggctgctgggcggtctggtgcacagcgtgctggtcaaacgcggccggccggacaaagtctttagcccgctgaccgccggggcgatcaccttcgtggccgagctggtgcagatgatgatcattctgctgattgcccgcccgttccaggacgccctgcatctggtgcagagcattgccgcgccgatgatggtcaccaataccgtcggagcggcgctgtttatgcgcattctgctggataaacgggcgatgttcgagaagtacacctccgccttttccgccacggcgctgaaggtggcggcgtccaccgaggggatcctgcgtcaggggttcaacgaagagaacagcatgaaggtggcccaggtgctgatccaggagctggacatcggcgcggtggcgatcaccgatcgcgacaagctgctggcgtttaccggcatcggcgacgaccaccatctgccgggcaagcctatttcctcctcgtatacgcaacgggcgattgagaccggggaggtggtctacgccgacggcaacgaggtgccttatcgctgctcgattcatccgcactgtaagctggggtcgacgctggtgatccccctgcgcggcgagaaccaacgggtgataggcaccattaaactgtatgaggcgaaaaatcgcctgttcagttcgatcaaccgcaccctcggggaggggattgcccagctgctgtcggcgcagatcctcgccggacagtacgagcggcagaaggcgctgctgacgcaatccgaaatcaagctcctgcacgcccaggtcaacccgcacttcctgtttaacgcgcttaacacgctgaaggcggtgatccgccgcgacagcgatcaggcaggccagctggtgcagtatctgtcgaccttctttcgcaagaacctgaaacggccgacggaaattgtcactcttgccgatgagatcgagcatgttaacgcctatctgcagattgagaaggctcgctttcaggctaacctgcagatccagatggcggtgccggaagggctggcgcatcaccagctgccggcttttaccctgcagccgatcgtggagaacgccattaagcatggtacatcgcagcatctaggcgtcggcgaaattaccattcgcgccagccaggacgatcgctggctgcagctggatatcgaagataacgccgggctgtaccgggccaacccccaggccagcgggctggggatgaatctggtggacaggcggctgcgggcgcgttttggcgccgactgcggcatcagcgtcacctgcgagccggagcgctttacccgtgtcaccctacgtctgcccctggaggagaatgcatgctgagagtattgatcgtcgatgatgagccgctggcgcgggaaaacctgcgcattttgctggagacacagcgcgatatcgagatcgtcggcgagtgcggcaacgcggtggaggccattggcgcggtgcataagctgcgtcccgacgtgctgtttctcgacatccagatgccgcgcatcagcggtctggagatggtcgggatgctcgacccggagcaccgcccctatatcgtgtttctcaccgcctttgatgaatacgcggtgaaagcctttgaggagcatgcctttgactatctgctgaagccgattgaagctgcccggctggagaaaaccctcgcccgcctgcgccaggagcgtaatctgcaggatgtgtcgctgctggatgatgctcagcagacgctgaaatacattccctgtaccggccacagtcgtatctggctgctgcagatggaggatgtggccttcgtcagcagccggatgagcggcatctacgtgaccgaccgcgagggaaaagagggctttaccgaactcaccctgcgcaccctcgagagccgcacgccgttgctgcgctgccatcgccagtatctggtgaatatggcgcacctgaaggagattcgcctggaggagaatggccaggcggagctgctgatgcgcgccgggcaaacggtgccggtgagccgacgctatttaaaaagcctgaaagaggcgattggcctgtaaagctggtacactgcgccccattgcatcatcgacagtaaaaggccctcatgctcagtaatgatattcttcgtagcctgcgctacaccctgaaagtcaataataacgatatggtgcgcattctcgcgctctccgctatggaatccaccgccgccagcttcgacacctggacgacgaaagaggatgaagagggctttgttcgctgcccggacattatcctgtcgggtttccttaacggccttatctatgacaagcgcggcaaagatgattcggccccggagctggcgctggagcgtcgggtgaataacaacacggtgctgaaaaagctgcggatcgccttctcgctgaaaacggacgatatccaggcgattatgagcgagcagaaataccgggtgtcggtgccggagatcaccgccatgatgcgctcgcctgaccacaaaaactaccgcgagtgcggcgaccagtttctgcgcaatttcctgcgcggactgacccagcgggtgcataacccgaaggcatgattttttgccgggtggcggcttcgcctgacccggcctacaacgactgcccccgggcgcgtgctagcatagcgccgccgggcaaaaaaaagccggagatactctccggcttttttgctatttcacctgctgacccggcttggcgccgtcgtcagggcttaacaggaagatatccttcccgccagggccggcggccatcaccatgccctcggagatgccgaagcgcattttgcgcggcgccaggttggcgaccatcaccgtcaggcggccaatcagcggctgcggatccgggtaagcggagcggatgccggagaagacattgcgtttttcgccgccgagatccagcgtcaggcgcagcagcttgtcggagccctcgacgaattccgcgttttcaatcagcgccacgcgcagatcgactttggcgaaatcgtcaaaggtgatggtctcctgaatcggatcgtccgccagcggaccggtgaccggcgccgcggtggctttcacctcttctttagaggcttccaccagggcttccacctgtttcatctcgatgcggttgtacagcgccttgaacggattcaccttatgcgccagcagcggctgctgaatggcatcccagctcagttcgctgttgaggaatgcctccgcacgcgcggccaactgcggcaggaccggcttcagccaggtcatcagcacgcggaacatattcaggcccatagtgcagatggcctgcaggtcggcgtcgcggccttcctgtttcgccaccacccacggcgcctgctcatcgacatagcggttggccacgtcggcgagggccatgatttcgcggatggccttaccgaactcgcggctgtcccacgcttcgccgatgctttccgccgcgtcggtgaaggttttgtacagcgccgggtcggccagctcagcggccagcacgccgtcgaaacgcttgctgataaagccggcgttgcgtgaggcgaggttaaccaccttgttgacgatgtcggcgttcacgcgctgcacgaaatcttccaggttcaggtcgatgtcatcgatgcgtgaagagagcttggcggtgtagtagtagcgcaggctgtcggcatcgaaatgatttaaccaggtgctggccttgataaaggtgccgcgcgacttggacatcttggcgccgttaaccgtcacgtagccgtgcacgaacaggttagtcggcttacggaagttgctgccttccagcatcgccggccagaacaggctgtggaagtagacaatgtctttgccgataaagtgatacagctcggccgtggaatctttcttccagtattcgtcgaagctggtggtgtcgccgcgcttgtcgcacaggttcttgaaggagcccatgtagccgatcggcgcgtccagccagacgtagaaatatttgcccggcgcgttgggaatttcgaagccgaagtacggcgcatcgcgggagatgtcccactgctgcaggccggattcgaaccactcctgcatcttgttcgcgacctgctcctgcagggcgccgctgcgggtccacgcctgcagcatttcgctgaacgacggcaggtcgaagaaaaagtgctcggagtcacgcatcaccggcgtggcgccggagaccaccgatttcgggtcgataagctcggtagggctgtaggtcgcgccgcacacttcgcagttatcgccatactggtccggagatttgcacttcggacaggtgcctttcacaaaacggtccggcaggaacatgcctttttccggatcgtagagctgagagatggtgcggtttttaataaaaccgttctctttcaggcgggtgtagataagctccgacagctcgcggttctcgtcgctgtgcgtcgagtgatagttatcatagctgatgtcgaagccggcgaaatcggtctgatgctcctgactcatttcgccaatcatctgctccggtgtgataccgagctgctgcgctttgagcatgatcggcgtgccgtgggcgtcgtcggcgcagatgaagttgacctcgtggccgcgcattcgctggtaacggacccagacatcagcctggatgtgctccagcatgtggccgaggtggatggagccgttggcgtacggcagggcgcacgttaccagaattttcttcgcgacttgagtcatagtgagcattacatcttctgttgtaaaaagggcttccgatattaccaaaagggctgtgggtgcgccataaatggctgcccatatatggataatcgttacctgtgataaactctgtgattactgaaagcatctcaaaacaacaaaggagtcgggatgaattcgcaatcccaggccaaatcccctgagcgcctacgtgcgatggtcgccgggacgctggccaatttccagcacccaaccctgaagcataatctcaccgcccttaaggcgctgcaccatgtcgcctggctggacgataccgtccatattgaactgcaaatgccgttcgtctggagcagcgctttcgaagcgctgaaagagcagtgcagtgccgaactgctgcgcatcaccggcgcgaaggccatcgactggaagctgacccacagcatcgcgaccctcaagcgggtgaaaaaccagcccggggtcaacggcgtgaaaaacattatcgccatcagctccggcaaaggcggcgtcggtaaatcttctactgccgtaaacctggcgctggccctggcggcggaaggggcgaaggtgggcattctggatgccgatatctatggtccgtcgattccgaccatgctgggtgcggaagacagccgcccgacctcgccggacggcactcatatggcgccgatcatgaaatatggtctggcaaccaactccatcggctacctggtgaccgacgacaacgccatggtctggcgtgggccgatggccagcaaggcgctgatgcagatgctgcaggagacgctgtggccggatcttgattacctggtgctggatatgccgccgggcaccggcgacatccagctgaccctggcgcagaacattccggtgaccggcgcggtggtggtcaccacgccgcaggacatcgcgctgatcgacgccaaaaaaggcatcgtgatgttcgagaaagtggaagtgccggtgctggggatcgtggaaaacatgagcatgcatatctgcagcaactgcgggcaccacgagcctatcttcggcaccggcggtgcgcaaaaactggccgagaaataccacacccagctgctgggccagctgccgctgcatattacgctgcgggaagatctggataacggcacgccgacggtggtggcgcgtccggacagcgaatttaccgacatctaccgccagctggcgggccgggtggcggcccagatgtactggcagggagaagtgatcccgggtgagattgccttccgcgccgtttaaggccgcggcgagcgcatcagccagtatctgcccttgggcgacgcgccctgtgcttcgatggtccagccatgacgctggtagaagcgcagggcgtttttattttccatcaggcacttcagcgttccgctggcggtaaaggtccgttcgacctgcgccagcagcgcgctgccgatatgtttgccctgccagtcggggtcgacaaacagatggtgaaggaaattatcggcggtccatacggcggcaaagcccaccggctggccgtcgcattccgcgacccacagctgttcatccgcggtggcggcatcgaaatcctccagccgccacgccgcggcgggaagccaggtccacgataaactgcgcgcccgcaggaagatctggcgcagcgccggagagtccgctggctcgctggggcggacgtggagattgcgcggatcagcggtgatagaagatctcgccatcgtacactttgaggattttgccttcggtatcggtgatcagcacgtagttaccgcccatataggtccagtggctgccggcgtccggcgcaggcaggttacgctgctgccactgtttgatgttgtattccggggtgagatacatcgccggaacggtgtcgccgatgtgaaactgggtgaaatcggcggtgaactctttcagcgcatactgatcgatccccgcggcagtagccgtccagctggcgccagcggtggcaagaagtacgcccagaagcatcatttttgttttacgcatagtttcctcaatattacctggactcaaaatagcagcctcgtatcattcctgatgcgttgctgaaatggcaagcactggatttttaaaaagtgtaagcaaaacgcggcgcaagtcttgtgccgcttgcgttgcagcgacggtgatgcgtattttgggagcaatctgaagcaggggagaatcggcatgttcaggctggaagatctgaccttatttgtccgcgccgcggcgctgggcagttttagcgacgcggcgcgcgaggccgggcagcagccggcgcaggtcagcgcggcaattaagcgtctggagacgatcctcaatattcgcctgtttgcccgttcgacccgcagcctgcgcctgacgccggagggggagacctggctgccctacgccacccagatgctcgataccctcgaggccggtctgcagaagatccagaccccggatgatgaagttcgcggcatgttgcagattgccgtgccgtcggacctcgggcgtaacctgctcctgaccctgttccgcgatttccgccaacgccacccggcgctgcgcctgcggctgctcttttccgatcagctgaccgacgtgtttaaagatccggtggacgttgcgtttcgctatggcaataacgacgatgcctcgtttatctcgctgccggtggcgccggaaaatcgtcgggtgctggtggcctcgcctgagtggatcgcccgccatggcgaaccgcagaccctcgaggaactcagccagcacaatgcgttgatctacattttgcgcggccgtccgttcgaccgctggtcgctgagcctcgacggcgtggttcagcagcagaaggtttccggcacggtgatgagcgacgacgccgaggtgatccgtcggctggcgatcgccggggagggcattgcctataaatcgatgctcgacgtcagcgacgatctgcgggcggggcgcctgcggcgcctgctgccgcgttatcagggggatgtagtgccgttgaatctgatttgtccgcaccgcaaacagctctctgccgcggtgcgtttgttatatgaagaggtgaaatcacattgtgaagggcttaatgcctgactaaggtcgcgaagtaatacaccagcgggacggccaatacccacaggccaatcgggatctcccgccacttaccggcgatagccttgatcacaatgtaaaacagcagcccgccggcaatcccggtgccaaagctgttggcgataagggtgatcatcaccatcatcagcaccggcagcccgtcggtgaagttggcaagatccactttgcgcaggccgctgaacatgttcaggccaatcaggatcagcgccggggcggtggcttctttcgggatcatcaacgccaccggcgtgaacagcagcatcagcaggaacattaccgccgccgacagcgcggtgaggccggttttgccgcccgcttccgctgccgccgaagattcaatcagcgccgtcgccgccggaatgcccacccacgggccgagcgcggcggcaatcgaatcgaccatgaacgggcgattaatctgcggcatgttgccttcttcatccagcagacccgcctcgccgcccaccgccagcgttgtccccatagtggagaaaaactcagatgcgaaaaagacgaacaggaacggcaggaaggcgatgtttaacgcccccagcaggtcaacctgtcccagcaccggcgccagcgagtggggggcatcgataaaatgcgtcggcagtttagtcacgccgaacgggatacccaccagggtagcgcacagaatggcccacaaaatggcgcccggaaccttacgcgcctgcagggctatcgccaggaacaggccgcacagcgccaccagcgcgccgggggcgagaaagtcgccgagcatcagcgcgttggttttcgcattggccagcaccagcccggcattgcgaaaaccgagcacggcgacaaacaggccgatggaggccgtcaatcccagcttgatcgactgcggcaccgagcgggtgaccacttcgcgcaggccaaagcgggtcagcaggaagaagaggatccccgaccagcaggcaattccgaggccagtctgccagccaatcccttcgctaccggccagcgtcacacccaccagcaccgagccgccaatgcccgggccgacgataaacggcaggttggcataaaacgccatcagcagcgaaccgacgacgaagaccagaatggtgccggtggtggcggcgcctttatccatcccgccgatcgccagcagccccgggataaccaccagtaaataggcggcggcgagaaagccggtgatcccggccaggcattcggtgcgtagcgtgccgccgcgcgagcgcagcgcaaagcggcgctccagccagttagcgcgggcggaagagtgaagtgtgttatcggccatgctcaggctccctgaggattattgttgtgatcggttggctccgggatctcccggcaggctatcaacgggtcgactatctggcggctgccgccgtcggtcagacccaaatcggttaaatgcggcccggcgttacaggcaaggcaggtgccttcaatggccttgaagacccggtacggcggctcccagtcggcgacttggctgctcagatcgcgcagctcgcggaactgacgcgccagttccgcggccgggagatccgacagcatgccggcaatcggcatcgccacatgggcgaggatctcgccctgttgcgccagcgccatcccgccgccggaggcgataagctggttggccgccagcgccatatcattagcgtcgcgcccgagcaccaccagattatgcgagtcgtgggagtagctggtggcgatggcgccgcgcagctcaccccagccttcaagcagggcgatttgcggcgtcgcctgatggcggccgtggcggtgcttgacccagatcagactgaagccggcgggtagctggactttcccgtcacgaacctgcacttccacttcgccccactgggtgaagcgcgcgccgcggatatggcgcaggcgggcgatgccgtgacgaatgccctggacgcgcagaataaagtcatcggcgcggaggggagcgatctgcaaagtatcgcgcggcggcgtgacgcccgcggcgggcgcgatcggtctcagcaggttgcccgcgcgggccagcagcttaccgcctacgtagacttcgcgggccaccagtttctccagggaatcaaacaccaccagatcggcgcgccgcccggcggcaatcagcccgagatcgtggcgctgcaggcgaatagcggcgttgagggtggcgaatcgcagcgcatcgaccgccggtaaaccgtgctcgatcagcagattaagcagggcgatgatgccgcctttctccagcagcatatccggcggcacgtcatcggtgcagacggtgatctgcgaggagaggtgcggcagcgtttttaacgccgcgacgatatccggcagcagataggggtgcgagccgcggatctcgatcgtcagcccggcgcgcagtttttccagcgcgtcgtccgccgaggtcagttcgtgatcggaggtgacgccggcggcgaggtaggcctgcaggtcagcgccgctcaggccgcgggcgtggccttcaatcagtttgccgctgttgagaccggcctggacaatctcctgcatccgctcgctaccgtgcagcacgccgtgcatatccatcacctccgccacgccgcgcacttccggccagccgagcatggtctccatctccgcgccggcgaaatcggcgccggacatttcgagacccggcgtggaggggacgctggacggggcggcgaccatcacctgcagcggcagatggcggctggcgtccaccgcatagcgcacgccagcgacgccgaggacgttggccagctcatgcggatcccagaacaccgcggtggtgccctgggtgaggacgatttccgcatagcgctccggtggcaggtgcgagctttcgaggtgcacgtgggtgtccatcaggccgggggacaggtagccaccggccagggaacgcacttcatgggcgtcttcgcgactgccgcgcgggtggacgctggcgatcatctcgccgacgataccgacgtcagcggggcgaatttcgcccgtggccatatcgacgatctgcgcatcgatcagcagcagatcaaacggggattcaccgcgcgcggcctgcacggcgcgacggcggacttgagcattgctggacataaccactccggcacaaggataatgcggatactctaggggcacagcaaacgtttgcccagatgaataaatttatcacccgataagctcgggttattgtgcaggaccaccgtagcgaacccgatgatgaacgaaccctggcagcggctgcccgcgctctctcttaaacagcttcagtattttgtcaccctggcccagctgcgccattttaccgataccgccagtcgcctggcgattagccagccggcgctgagcagcgccctgcggcagattgaaacggtactcggcggcaaactggtcaaccgtaccgctgcgacggtcactctgactgaactgggggcggcgattttaccccacgcccagcggatcctcagcgtggcgcaggcggccttttccgatatgcagcagattgtcgaggcgggtggcgacgggacggtgcgtatcggtctggtgccgtcggtcagttcgctgctgtttccgctgctgccgcagaccctggctgaggcctttccgcgtctgcgcattgaatttcacgatcagaccaacgatgcgcttatccaggcgctgcagcgcggcgagattgatttcggcatcggggcgatcgacagctcactgcccgcagaactgctggtctatccgctgcgcgaagatcccttcgtggcggtgctgcaccgcgacgatccgctggccgcgcaggcgcatctgccgtggaaacagctggtggggcgggatattgctgtgttctcgaagggcaatatccagcggctggtggcggcattagtggagagccatcgcctgacgctgaccacccgctaccaggtggactatatcgaaaccctgtatggtctggtgcgctcgcgcttagcggtggcgattctgccggcgctgtacaccacccatctgcaggacccggcgctcagggtcgcccagctgcagcagccggcgcttgcccgcacagtggccctgatgcgcggcccgcaggcgctgcccccgcttattgaagactgtttttctctgctgcaggccgccttgcgctagggcaggtgcttgatcagcacgtccaggtttaagtggttgatgtactccagcgagtgtgaggagaggacgcccagcagccggttatggtgcccggcaataattaaatcgatctgccgctgccgaacgcaggtttccacgtcttcaaaccggcgggtggtcaccagcgagagggtatccaccggcagggagacggtgcaggccagctcgttgagcagggctttggcctggatcacctcctgcgagacctgatcgtcgcgcaggctgtcggaaacatagttcagcgcccggtaatcggtgctgatgtgggcgatggtgatgcgcatgccgttctcttctgccattctggcggcatgctggagcagcgggacgccgtcctgactgctgttaatcagtaccagcgcatggtgataaacggccatggcgtatatcctcggtaggctaaatagcgcatgatgtcattattttccgcccgccagcagcggaatgcaatcccgcccggtcgcctgatgagcatgatggccgcgaaggtgtcgtatccagggctaaaggcttgttgtatgaaccggtgagttgcggtaaattccacaacgcttaacaatttcactattttgactcggggtgcccttcttcgttgaaggctgagaaatacccgtaccacctgatctggataatgccagcgtagggaagtcagagaccgcagggtcattgcttctacctcgtctggcgggagcaaactatgcctgagctgttgaatcccgcgcctgtcgcgcacctgcgccatctgctgcgcgcccattccccccttgtgcactgcatgaccaatgacgtggtgcagacctttaccgccaacgttctgctggccgtcggcgcctcgccggcgatggtgatcgatccccgcgaagcggcgcagtttgccgctatcgccgatgcgctgttaattaacgtcggtaccctgaccgaagatcgcgccgtggcgatgcgcgccgcggtggagcacgcccgtcaggccggcaagccctggacgctggatccggtggcggtcggcgccctgaccgtgcgcacggccttttgtcacgagctgctggccttccagccggcggccattcgcggcaatgcctctgaaattctggcgctggccgggatgagcgccggcgggcgcggggtggataccaccgatacggccgccgcggcgctgccggcggcccaggcgctggctcgtcggctggctaccgtggtggcggtcactggcgaggtggattacgtcaccgacggcgagcgggtgctcagcgtggcgggaggcaatccgctgatgacccgggtggtgggcaccggctgcgcgctgtcggcggtggtggcggcgagcgcggcgctgccgggagaccggctggaaaacgtggccgccgcctgcgggctgatgaagcaggccggggagatcgccgcccgtcagggaggcccaggcagctttattccggcgtttctcgacgcgctgtatcaggaggtgcagggatgaaacgcatcaacgccctgaccatcgccggcaccgatcccagcggcggggccggtatccaggccgatctgaaaaccttctccgcgctgggggcctatggctgctcggcgatcaccgccctggtggcgcagaatacccgcggcgtacagtcggtctatcgcatcgaaccggattttgtggccgcgcagctcgactcggtgttcagcgatgtgcgtatcgataccaccaaaatcggcatgctggcggagaccgatattgtggaagccgtggccgagcggctggcgcgctaccgggtggccaacgtggtgctggataccgtcatgctggcgaaaagcggcgatccgctgctgtcggcctcggcggtggagaccctgcgtcaacgattgttgccgcaggtgtcattgatcaccccgaacctgccggaagcggccgcgctactcgatgccccccatgcgcgtaacgaacgagaaatgctggagcaggggcgggcgctgctggcgctgggctgcggcgcggtattgatgaagggcggccatctcgacgatgccgaaagcccggactggctcttcacccgcgaaggggaacagcggttcaccgcgccgcgagtgcagaccaaaaatacccacggcaccggctgtacgctctccgccgcgctggcggcgctgcgcccgcgtcacgcggactgggcggccaccgttaccgaggcgaaggcctggctgtcggcggctctggcgcaggccgactctctggaggtgggccacggtatcgggccggtgcaccatttccacgcctggtggtaaatggcagcgcaacgggacagcagaatctcctgaaaaaatggccccccggctggaaaataggctaagtcggtaccaggcttaacctgcccaaaaaaattgggttgggataatgcatgccggcttcggccggccttacgggagattgctatgactgatattacgcagttgctgggcaaagatgccgagagcctgttgcagcaccgttgtataaccattccgtccgaccagctgtatctgcctggcgcagattatgttgatcgggtgatggtggataacaaccgaccaccggcggtgctacgcaatatgcagaccctgtacaataccggacgcctggggggaaccggctacctttccattctgccggttgaccagggcgtggagcactcggcgggcgcctcctttgccgccaacccgctgtactttgatccgaaaaatatcgtcgagctggcgatcgaagccggctgtaactgcgtggcgtcgacctacggcgtgctggcctcggtgtcgcgccgctacgcgcatcgcatccctttcctggtgaagctcaaccataacgaaacgctgagctaccccaccgaatacgaccagaccctctacgccagcgttgagcaggcgtttaatatgggggcggtggccgtgggagcgacgatctatttcggctcagaacaatcgcgtcgtcagatagaagagatttccgccgcctttgagcgggcccatgagctgggcctggtcaccgtgctgtgggcctatctgcgcaattcggcgttcaagaaagacggcgtcgactatcatgtttccgctgacctgaccggtcaggccaaccacctggcggccaccatcggcgccgatatcgttaagcaaaagatggcggagaataacggcggctacaaagcggttaacttcggctataccgacgaccgggtgtacagcaaactgaccagcgataaccccatcgatctggtgcgctaccagctggccaactgctatatgggccgcgccgggctgatcaactccggcggcgcggcgggcggggagaccgaccttgccgacgcggtgcgcacggcggtgatcaataaacgcgccggcggcatggggctgatccttggccgcaaagcgtttaagaaatcgatggccgacggcgtgaagctgatcaatgccgtgcaggatgtttatctggatggcaaagtgactatcgcataaggcaaaaatccgggcggcaccgcccggattgctcgttgtttgtaccagatgcggtttattaagactctgccgcgttggcggtaaacggtttcgcatgctgatcgctggtaaagccaggctgttcaacgcggattaacgggcacaggaagaaggccagaatatataaggcggtataggctattaccacgccgatagtgctgaaatagggcagcagtaccacggcaatcgccggcgccagaaagttcgacagcccggctgacaggttatagaccgaaatcgcagcgcctttatgcttcggctccagcgccgggaacaccgccgccatcggcacaaacgcggcgacaaaaatccccagggcaatagccggtaccagcgccatggcaaaattatggccgaagtgctggggtaggtaatagaacgccagggtggaaagcgccatcccgatgcagccgaaccagcggataaccttcatccagcccattttctccgccacaatcccccagaaaacgttcgaaaagatcgtggtgaagaagaatgccgcccatacctgcagccattccgaggtggtaaatcccagctcatcaacaaacatcatcggcatgatcaccgcaaaaccaaacagcgacagggtgttgataatgcgcacaatgctcgagaacagaatgctgcggttggtatagagcagcgtcgccgcgcgccccagttcggcgaatttttcacgagtggtcaggttctgcatatggcgcggcgtttcggtatgacgcatcgacaccagcgcaataatgccgccggtggcgcaaaagagcagcgccagccacagggtgcccatttcgccaatgtggggaatggtaaagctcggaatatagctgccgaacacgccgatacccaccgagtagaccgcccagaaccagcccagcgcggagctggaactgtcgctgcggacgttgtggataatggcgacgataaaggagtagaggaacagtgggtaggccaggccgcggatgccataaaacagcaggatcagcgcatagttggcgcgaccgaggccgaagacgaggaacagtacgtggaacacacaccacagcacgaagccaatcagcatggctttacgtggggtaatgatttccgccaccacgccggagacccacgccgacagggcggcagccagaccgtagagagtaaaggcaaaggaagcctgcgccggggtgaatccgagtgctttgatgtagtgcgacagaaaagccagctcaaagccgtcgccggtcataaacacggcgatggcgacatatccccagatgaggttgagcggtagaccgtaccactgtttgttattaacggacatgttgacctcgatttcagagtgcagatgagtgtctccgctgcacagcagcggagcattattgttataaaataaggaggtatgttattcgcgaatcagcctgccggcctgttgtagcgccttataggccgcatacctgcgctgatgaagcgggctaaacgcagtctcgctgtgataggtggcatccacctgagtaaactgcttcatggcctccggcagcgaagccgcgactctgcccgccaccgcgccgaggatggcggaacctaacagcaccggctcgcggctggcggtgctcacgacgctaacgccgcaggcgtcggccaacagctgacgcaccagcggatgctgcccggcgccgccgctgatgacgatattttcactctcaattccgcaggcgcgctgggcgtcaatgatctgtcgcagaccatagccaatcccgcatagcccggcaacgtacagcgcggtcaggttatccaggtcccgctccatccccagcccggcaatcagcgctttcgcgtggggatcggcaagcggcgcgcgattaccgagaaactccggaacgacgtgcagaccggcggccagcgttaccgcctcagaaggggaagcaacttgcgtcagaacgcgatccgccagccagaccggtagagggacgcctgcggctttcgcttgctcgcgcgcttccgccgccgccggatggaagctcagcagctggtcgatagccgcgccggcggcgctttgcccgccttcacttagccagtagcccggcaccatcgccgaatagtaagggccccagacgcccgggacgaataccgcttcctgagtggtggtcatggtgcaggaagaagtgccgaagacataggccatattgttgaccgcgccgttaagcacgccgacggtaccgatgccgcccgcgtgggcgtcaatcatccccaccgccaccggcgtgccgatcggcaggcccatctcctctgccgccgtggcgcaaaggccctcgccgcagggggtgcctggatcgacaatccgctggccgatgcggacaaaatcttcatccgccagctcttcgaggccaatctggcggaagtaaccggcatcccagcgttgttcatgcgccagataggtccatttacaggtcaccgtgcagaccgagcgggcttcatcgccggttgagcgccaggtgaggtaatcggcgaggtcgaagaagtggcgcgcctgctgatagatgtgcgggcgattctccttcagccacaaaattttcggcgtttgcatctccggcgagattttgccgccaacgtaccgtagtaccgggtggcccgtggcattgatcttttccgcctgcccggtggcgcgatgatccatccagacaataatgttgcggtccgcatcgtccgaaggcccgaccgccagcggcgcatcgttatcgccaatcaccaccagcgagcaggtggcatcgaagccgatcccggcgatcgacgacggcgaaacgccggcgctggccaccgccgttttaatgcagtagcacaccgcctgccagatctcacggctcgactgctcgaccttgtttccggcgctgcgaaacagggttatttcccgggtcgcgtgggcgaggagctcgccccgcagattgaataccccggcgcgcacgctgcccgaaccgacatccacgccaataatgttttgcgtatcgttttgcatcacatcctctcataggctggccagggtcagagatccacgctgttcggcaggatcacaatgtcgcgcacggtgacgtttttcgaacgcgtcaccataaacagcaccgactccgccacttcaatcggctgcatcaggctgccgttggccagcgcttcgtccattttggcttttggccagtcgtccagcagagcggtaaccaccgggcccggcagtacggcgccgacgcgcacgccatactgcgccacctggcgacgagtggtgtgtacaaatgcctgcaccgcgaatttcgacgcggtatagacaggctcccagatcaccggcaccacgcccgcgatcgagctggtgaagataatatccccggatttttgcgcgatcagatgcggcaggacgctgcgcacgcagcggaaggcggcgttgatattaaggtgcagcacgcggtcccagacgtccgggtcgccctcggccaccggcccgccgatataggcgccggcgttggcgtggaagatatcgagacgcccggtaagctgcaaaatgccctgcagtaggttatcgacctggtccgcctgcatcaggtcgacctgcagggcgaaggcgttttcgccaagttcggcgaccagtttgttgagcttttcgccttcgcggtcgatcagtaccacttttgcgccagctcccagcagggtcctcgcgcactcgaggccgataccggacgccgcgccggtgatcgcggcgactttaccgctgagggaagtattcatagaggagacagagtggttcattttataatcctttgccgtgtctggttaaaactatcgaacgcgagggcatcacgttcgaggtgatagactaaacctggtaacatattgaatatcagcatcttaattcaggcttgctggcatgttgaggcggtatgcgcgcgtacttcctggcgtgaaaaggatgctcaatcgatgaagctatgttgctctcgcttcatcgattgagcaagtggggaaattaacagcgacatgattttgtgacgcaagttggaaaaatgaagaagataacgatttacgacctggcggaactttccggcgtttcggcgagcgcggtgagcgctatcctcaacggtaactggaaaaagcgccgcatcagcgccaagcttgcggaaaaggtgacgcggattgccgaggagcagggctatgcgattaaccgtcaggccagcatgctgcgcagtaaaaaatcacacgtcatcggtatgattatccccaaatatgataaccgctacttcggttccatcgccgaacgctttgaggagatggcccgcgagcgcggcctgctgccgattatcacctgtacgcgccggcgtccggaactggagatcgaggcggtaaaggcgatgctctcctggcaggttgactgggtggtcgcgaccggggcgaccaatccggataaaatttccgcgctatgccagcaggcgggcgtgccaacggtcaatctcgacctgccgggctctctctcgccgtcggtgatttcggataactacggcggcgcgaaagcgctgactcataagatcctggctaatagcgcccgccgccgcggagagctggcgccgctgacctttatcggcgggcgcagcagcgaccataacaccagcgagcgtttacgcggcttccacgatgcgcatcgcgagctggggcttagcgtgccgcaggagaatattctggctcccggctattcgaaaggccacgttgaggactgcctgcaggagcggtttggcagcgcgaagacgttgttgcaggggatatttgttaactcgacgatatccctggaaggggttgtgcgctggctgtcgcaggtgggtctgaccggcagcgagcagccgccgatgggctgcttcgactgggatccgtttgtctatctgctggggcacgatatcgacatggtgcagcaggacgtgccggcgatgctggacgctgttttttcgattattgacgccggcgaagccagccagcagcggattgaaattcccccgcgactgatgagcagcagctgagtcgctgtctggctgttcgacgttaccgcgtcagcagccagcgggcggtatgctcatcggtcaccaggccattaatccagccgcctttaagggcggccaggatcgccggtcgtttatgttctccacaggcagcggcaatccgcgggcagtggctctggcggatatcatagctggtgatcatgcggttgatctcgctgtctaccacgtcgccttgcgcatcaataaaccgcccgaggatctccccgatgccgccgcgggcggtcagctcatccatctgcgcctgattgataaacccgtctttaaagatcggactttgcgtgcccagcggaccaatgccgacaaaaatcacgtccgcctcgcgggcgacgctggagacgctgcggaataggcgattggtgcaccacatttcatactcatccgcgctttgggcgtagcgcggcgccggccactgatagtacttggccttaattttgcgggtcagcagcaggggcacgtcatcgtaataattgcactgcccgtcggcgttcatggcactgatcagcgccacgcagcgggtattcaggctgtcaaaatcgatgcgctgcagcgcttttttcagggtcaggcccgagcccagaccgataattttctctttatcatcctgcagatagcgagccatcagctgatagcagccaaatgacacactgtcgagggtgctttcttcgctaaaggcggggaccacattgcactcgatcaagcggtatttttcctgcagcaactgcgcataatcgaggcagttcgctaccggatggtgcagattaatcgacacaatcccttcttctttcgcggcggcaatcagccgttgcaccaccggtctggaggtgcccagctggctggcaatctcgctctgattctggccggcgatgtagtacatccatgcggcacgcaccttctgatccaaccggatatcgtcttctttactcatggtttcccgccctaagttgctggccagggcacgcaattggcccggcgaatacccgcattctcgccgtggttggcataactggcaagcttttgctctttgttggtcatttgtaatttaattgggtaattgctcttttgtgatctatggctcttatttcggtcaaatgatcaattacagtggcgccatcaactcaaggagagcagaacatgaacaatcaattcacatggcttcatatcggtctgggttcttttcatcgcgcgcatcaggcgtggtatctgcatcgtctgattgcttccggggataatcgctggcgcatcgcggcggggaatattcgcaacgacgccgagcaggtggtacaggcgctggcggcgcagggaggacgttacgtcctcgagaccgtcagcccggaaggggagcgcaaatatgaagagatcacctcaatccagaaactgctgccgtggcaggccgggctacagccgctgattaacgaaggggcaaacccgcagaccaaagttatcgcctttaccgtgacggaaggggggtactacctgaacactcgccatcggctggaaaccagcaaccccgatctgcaggccgacctgcaaggcgagtgcaaaaccatttacggcaccctcgcgcggatcctggaaaagcgcatggccgacaacgccgggccgctgaccctgctcaactgcgataacgtgcgccataacggcgagcgtttccacgacggcatggtcgagttcctgcagctcaccggcaaacaggcggtgattgactggatggcggccaacaccacctgtccgaacaccatggtggaccgcatcaccccgcgtccggcggccgatctgccggcccgcatcaaagcgcaaaccggaattgatgacaaagcgccggtgatgggggagacctttatccagtgggtagtggagaacaacttccgggttgcccgcccgaatctggaggcggtcggcgtggagatggtggagtcggtcatcccgtatgaagaggcgaaaatccgtattttgaactcgtcgcacagctgcattgcctgggcgggaaccttaatcggccagcagtatattcatgaaagcacgctgaccgatgttatctacgccattgccgaccgctacgttacggaggacgttattccgtgtctcggcgacaacggcattgatctgccgacctaccgggatgtggtgcttaagcgctttaccaacccctatatccaggacaccaaccagcgcgtcgccgccgacggcttctcgaaaattccggcgatgatcgcgccaaccttgcaggagtgctaccaacgcggcgtccgccctgaggcgaccgccatgctgccggcgctgttcttcgtctttatggagcagtggcacaagggaactctgccgtatcagtaccaggacggcatcctggatgcgcaggcggtgcatgagatgttcgaggctcaggatccggtggctgtcttcgcccgtgataaagccctgtttggtgatctcgccaacaacgcggatttcctggcgctgatgcgcgagaaagtcgccgccgtttacacgctgattaactaagaggtggctatgtatctgggtatcgatctcggcacatcggaagtcaaagcgctggtcattgatgagaaccatgaggttatcgccagccatagcgcgccgctgagtattcagcggcctcatccgcactggtcagaacaagcgccggagctatggtgggaggcaacggagtacctgatggccacgctacgggaaaaatgcgcgcagcattggccggccattaaggcgattggcctctccgggcagatgcacggcgcggtgttgctggatgcagagggggaggcgatccgtccggccattctgtggaacgacacccgctgcgccgcagagtgcgccgagctggaggcgatggcgccggagctgcatcaggtggcgggaaacctggcgatgccgggctttaccgcgccgaagctgttgtgggtgcgccgtcatgagccgcagcactttcagcgcaccgccacggtgctgttgcccaaggattatctgcgctaccggatgaccgggaagaaagtctccgatatgtcggacgccgccgggacgctgtggctggacgtggcgaagcgcgactggtccgacgctctgctggacaagtgcggcctgtcgcgtagccaaatgccgacgctggtcgaaggctgcgaggtttccgccacccttgacccgcaggtggctgcgcgctgggggctgaacgcctcggtggtggtggccgggggcgggggggataacgcggtcagcgccattggcgtcggcgcggtctcgccgggggatgcgtttatttcgctcggcacctccggggtgctgtttgtggtgaccgatgcctatcgtccggcgccgcagtcggcggtacatgcgttttgtcacgtgctgccgaacctgtggcaccagatgagcgtcatgctgagcgccgccagctgtttgcagtggttctgccgcctgaccggcaccacggaggtggcgctgctggcggagattgccgagctaagcgaggaggataaagccaacgccccgttcttcctgccctatctctccggggaacgaaccccgcataacgatcctgacgcgcgcggcatcttctggggcatgacccatgccagcctgcgcgcgcagctaggctacgcggtgctggagggggtgagctttgggatcaacgacggcctgcaggcgttaaaagagagcgggacgccgatcgcgcagtgctcgctggtgggcggcggcgcccgcagcccgttctgggcccagctgctggccgatattctcgctatgccggtggtgacccacaaaggcggagagaccggcggcgcgctgggcgcggcgcggctggcctgcctggcggcgggcaaaccggttgccgcggtgtgtgaaaaaccggaagtctggcagacctggcgtgcggatcctgttcgccaccacaccctgatgcaacgctacgcgcagtttaaagccctgtatttaaacgatcttaaatatcgacagcactgattttcatcataaccgccgcttcgttgcacgtcgcggagcggccaccctgtaccctgaaaacgaggtcattatgtctatcaataataaacagtggctcggtttacccctgaacctgctctggggatacatcgccattgccgtatttatgaccggcgacggttttgaattagcctttctgtcgcactatatcaaagccctcggcttctctccggcggaggcctcctttgcctttaccctctacggcctggccgccgcgctgtcggcgtggatttccggggtggtggcggaaattatcaccccgctgaaaacgatgatgattggcttcgtgctgtggtgcgtattccacgtgctgttcctcgttttcggcctcggtcacgccaactatgcgctgatcctgcttttctacggcatccgcggcttcgcctatccgctgttcctctactcgtttatcgtggcgattgtccataacgtcaaaagcgacaacgccagctcggccatcggctggttctgggcggtgtattccatcggcatcggggtcttcggcagctatattccgagctttaccattccgcacattggcgaaatgggcaccctgtggctggcgctggccttctgccttaccgggggcgtgattgccctggtttccctgcgccatattcaaacgccgcagcatatgcagaatctcaccacccgtgagaagttttccgagctgggacgcgccgcgacgctgctctataccaaccgcaatattctgctgtcgagcatggtgaggatcatcaataccctctcgctgttcggctttgcggtgattatgccgatgatgtttgtcgatgagctgggcttcagcacttcagaatggctccaggtatgggcagtcttcttcttcaccaccattttctctaacgtgctgtgggggatcctcggggaaaaacttggctggatgaaggtggtgcgctggttcggctgcatcgggatggcgctctccagcctggcgttttactacattcctcagcactttggccatagctttgcgatggcgctgatccccgccatcgccctcgggatctttgtcgccgccttcgtgccgctggcggccgtgttcccggcgctggagccgaagcataaaggtgcggccatttcggtctataacctgtcggcggggatgtcgaactttctcgcgccggctattgccgtggtgctgctgccgttcttcagcaccatcggggtggtgatcgcctataccgcattgtacgtggtggcctttttcctctgcgcctttatccgcgtggagcagccggggttctcccacaaggaagcaaccgcccgcgagcaggttgaattctcataggtactgcggctggcatgcgcttcatgccagccttaatgaggtgaacgaatgagtatgcaggcggttatttttgacatggatggcgtgattattgattccgaggcgctgtggcgtcaggcgcagattgacgccctcgcgcagtggggggcaacggcgagcgttgctgaatgtgaaaccctgaccaagggcaagcgcctcgacgacattgccggcacctggtgccgctattttcagcttgatctcgctccgcagcggcttgaagacgccatcctgcagcgcatcacccgcctgattgccgcgaaaggcgaaccgatgcgcggggtgcaggaggcgttacgctattttcgcgaagcgggttataagattgcgctcgccacgtcatcatctcgtcaggttattgccgctgtgctgaacaagctttcgctctggcacttttttgacgcgatctccagcgcggatgatgaaccacgcggcaaaccgcacccggcggtgtacctcacgacgctgcggaagctcaatctcaacgccagccagtgtctggtgattgaggatagctttaccggcttttgcgcggcccagtcggcggggattgccacgatagtgattgcagaagatagccagcacgcgcgttttcaggccgccgctggccgctatcaaaccttacctgaactgctggaagcgcttagcgcggagccagcggcggcggtttaagtcagccatttgtgggcgcagacattcccgggatgtagctggtcggttaatcttttctctgcgctcacgcccttttttctcctggtcgatctgcctcacatttcgctcatcttttgtgaaaacagtcacgtcttgttgtgccaatgcccaaatttatggccttgcttagcggtgtttgtccgaggcactactacgaagttgtgcttagattatatattgaaacgtactttcaataatgtgaaaccgctttgccgattttcttatgtcgatcggatttggccgtgataaggaccgagcatgaaaattgaatctgtgaatgtcaccgttttccaatatcccactcgtcgggtttccgacagcgccgggcactcccatccgggggttgaaagcatggccaaaatggcgatgctgaccatcaccgctgatgatggggcgcagggcttttcgtttgcgcctccggaagtcgtgcgcccgttcgtggtgaatactttttttcgcaaagtgctggtgggacaggacccgtttaaccgtgagcgtatctggcaggatcttaaccactggcagcgcggcagcgcacatcagctaacggagcgcgcgctgtcgtttgttgaacaggcgctgtgggacctgatcggccgcagccttaagatgccggtttataagctgctcggcggctatcgcgacactgtcccggcttacggtagcaccatgtgcggcgacgatctgccgggcggcctgtcgaccccggaagagtatgccgcttttgctgagaagctggtcgcccgcggctacaaggccatcaaactgcacacctggatgccgccaatctcttttgcgcccaatcccaaaatggacattaaagcctgcgcggcggtgcgcgaagccgtagggccggatattgacctgatgattgatggctatcactggtacagccgcgccgaggcgctgtggatcggcaaagagctggaaaaactcaatttcgcctggtttgaagagccgatggaggaggattcgatgtcttcctatgcgtggctggcggaaaacctgtcgattcccatcgtcgggccggagagcttcggcggcaagcaccacatgcgcgccgaatgggtgaaagccggggcctgcgacattctgcgcgccggcgctaacggcgtgggggggattacaccgaccatgaaggtggcggcgctggcggaatctttcggcatggattgcgaagtccacggcaacggagcggcaagcctggcggtggtgggcgcgatccgcaactgccgctggtacgagcgcggcctgctgcatccgttcctcgactacgatgaaccggcggcctatctcaacagcattgtcgacccgatggatgaccagggatttgtgcatttgtcacaacgtccgggtctcggtgaagacattaattttgcgtatatcgaagccaataccgttagccacgactgatttaaaaaaataaatacccgatggcgctgcgcttatcgagcctgcggcccggtagaccggataagccgaaaatgccgccatccggcaacatgtaccctacagtacaggcaaacagagatatgaaacaaacctccttactgggagcgtgtattctcgcgctcgccatatcgatggggagcggggaggcggtggcgaaaacgccgcccgaccagctgatcatcggcatgaatatgaataacctgctcacccttgacccggcggcgatgaccggtaacgaagtggtggggatcgtggtcaacctctacgactcgctggtggagcttgaccctgagcagctcaccaccgtcaggcccgcgctggcgaaatcctgggatatcagccccgacggcaaaaccctgacctttcatctgcgcgatgacgttaagtttcactccggcaacccgctgaccgccgccgacgtcgtgtggtcaatgcggcgcatcctgcacctcaacctggcccaggcctcagtatggaaatcctatggcttcagtaagaaaaatatcgacagccaggtcagcgcgccggaccgcttcacggtgcaaatcgtattacccaaagataacgatccgcagctggtgatttactcgctggcggcgctgggcaacctcggagtgctggacagtaaaacggtgcaaagccatcagcaggataacgactggggtaaccgctggctaaccacccatgaagccggttccgggccgtttatcctcgaaacctggcaggcgaaagatgtgctgcgcatgaagcgcaaccctgactactggcgcggcgaggcgaaaatgagccgcgtggtactgcgtcatttccaggagtcgcaaactctgcgcctgatgatcgaaaaaggcgaccttgatattgccaacaatatggcggtttccgatatcaacgccatgcgcagcgatccgcagctgaccgtcgatgcggtgcagcgcggcaccatgtactacgtggcgatgagcatgaaagaggcgcacttcgccaatccgaaagtgcgcgaggcggtgcgctatctgattgattaccagggtatcaataaagcgctgatgccgggctacggcgtgctgcaccagcggcctatcaaagcgggaatgccgtccacgctacccgatcccggctacaggctggatgtggcgcgggcgaaaaagctgctggcggaagcgggatatcccaacggctttgataccacgctgcgggtactctccgatcagccatttcttaacatcgctatcgccgtgcagtcgacgctgatgcaggcggggattaacgccaaaatcatcaccggcactggtaaccagatctacggcgcaatgcgcgagcgtaaatttgacctgctggtaggtcgcggcggcagcgggatggagccgcatccgcactccagcctgcgcgcgctggtctataacccggataacagcgataaggcgcgcctgaccaacttccagggctggcgtaccggtttttacgacccgcaactgaatacgatgattgaccaggccctgctggaacgcgatccgcaaaaacaggtggctgactaccaggccatccagacacgctacgaccagctggttccggctttaattccgctttcgcagatggttgattcggtcgtcgtgcgcaacgaggtacgggagtatcagccgcacccctccgccaccacttttctgcgtgacgtctataaagtccgcgaaggagagaaaggatgagtaccgcaatccttgcgcccggctcacgcggccggcgcttatcaaaacggctactgcaggtggtgattacactgttcggcctgctgctgctgacctttaccattggccgcgtcatgcccatcgacccggtgctggcgattgtcggcccggatgctgaccagagtacctatcagcaggtttaccagcagctggggtttgataaatcgctgaccacccagtttggcatctatttcgtcaacctgttgcacggcgatctgggcaacgcgctgctgaccgggaaaccggtagtggacgatattatccgcgtcttcccggccaccatggagctggcaacgatggcgattattgtcggcgcgggtcttggtattccgctgggcgtgttggcggcggcgcggcgcaatagcgtctccgattatgtggtacgcattatcagcctggcgggctactcgacgccgatcttttgggtcgggatgatggggctgctggtgttctatgcctggcttggctgggtaggcggcgccgggagggtagatctcgggctggatggtgtggtgtcgcgccgcaccgggctgatgaccgttgatgcgctgctggccggcaacggccaggtgttctggaacgccattaatcatctgattcttcccgcctcgctgctgggttttcactcgctggcttatatcagccgtatgacccgcagctttatgctggcccagctgtcgcaggagttcattattaccgcccgggtgaaagggctgaccgagcgccaggttatctggaaccatgcgtttcgtaacatcctcgtgcaactgctgacggtggtggcgctggcctacggcgcgctgctggaaggcgcggtgctgattgaaactgtcttctcatggccggggtttggctcctaccttaccggaagcttgctgctgggcgatatgaatgcggtgatgggctgcgtgctgctggtgggggtgatcttcgtgatgctcaacctgctctccgacatgctgtatcaattctttgacccgaggacaaaatcatgaccgtttctctggattcgccgctttcgggtggtgcgggcgaaggccgtcagcggctgcaacgcgcggcggcgcgggccgtcgggtttatcggcaaaatggcgcgcaatccgctcacggccatcggcggaggaattatctttatgctgctggtggtggcgattttcgcgccgctgattgcgccttataacccgctggtacaggacctgaatagtgcgctggtcgcgccgaatgcgcagcactggttcggcaccgatgagtttggccgggatatctttagtcgcctggtgtacggctcccgcatcacgctctatatcgtgctgctggtctcagtgaccgtcggtccgctcggactgctgctgggcgtcagtgccggctatttcggcggtaaagtcgatatggtgctgatgcgcgtcaccgatattttcatctccttcccgagtctggtcctggcgctggcgtttgtcgccgctttaggaccggggctggagcacgtggttatcgccatcacgctgaccgcctggccgccgattgcccgtctggcgcgcgccgaaacgctctctctgcgccaggctgattttatctccgccgtgcgtctgcagggcgcttcatcggcccgcgtcctctggcgccatatcgtgccgctgtgtctgccctcggtcattatccgtatcaccatgaatatggccgggatcattctgaccgcggccggcctaggctttctcggcctcggcgcgcagccgccagagccggagtggggagcgatgatctccagcgggcgcacttatatgatggagtgctggtgggtcgtaaccattccggggctggcgattctgatcaatagcttagcgttcaacttcttaggagatggcctacgtgacatcctcgatccccgtagtgaataatgcaccgctgctcgacgtgcgcgatttgtgcgtcgactttgttaacggtagcgcggtgacccacgccgtgcgcggcgtctccttccagctggggcatgagaagctggctattgtcggcgagtccggttcgggtaagtccaccgttgggcgcgcgctgctgcagctgcatccgaaaaaggcccgcgtcagcgccagccggatgcagtttgccgacctcgatctgcagcatcttagcgaagcgcagatgcgcggcgtacgcggcaaacgtatctcgatgattatgcaggatccgaaatattcgctgaatccggtggtctgcgtgggtaagcaaatcgccgaggcctggcttactcatcatcccgggcgcaaagatgaggcgaaagccagggcgctggagatgctggaggtggtgcgtattcgccagccggagcgcgtttatcagctttatccgcatgaaatatccggcggacagggacagcgcatcatgatcgccatgatgctgattaccgacccggaactgatcattgccgatgagcccacctccgcgctggacgtgtcggtgcgcctgcaggtgctgggcctgctggatgacctggttcagtcgcgcgggctggggctgatttttatcagccacgatatcaacctggtgcgcagcttctgcgaccgggtgctggtgatgtacgccggacgggtagtggagtccatcgccgctaaagatctcgatcacgcccgtcacccctacactcagggattgattaactcgctgccggatatgcagcatcgtcgcccgatactgccggtgctgcagcgtcaggccagctggttaacggattaaggagcggataatgattgaagttcaacatctcaacctcgcgtttggcgagggggagaagcgtaaccaggtgctgtatgacgtcagtttccacgttaagcccggcgagatctacggtctggtaggagagtccggttccggtaaaacgacggtgctcaagtgcctggcggggctgtttacccactggcagggggaactgaccatcgatgctcagcccttagggcatgaaattagccgcgagcgctgccgtcaggtgcagatggtatttcaggacccctacggatcgctgcatccccgtcacaccattggcgatatcctcgaagagccgctgcagatccatcgtatcaacgaccgcgaccggcggatcaatgcgctgctggataaagttggcctcaaccgcgcctttcgcgagcgctatccgcatcagctctccggcgggcagcggcagcgcgtggcgatagccagagcgctgattcttgagcctcaggtgctgctgctggatgagccgacgtcggcgctggatgtgtcggtgcaggctgagatccttaacctgctggcagaattgcagcgggaggctaagctcacttacctgatggtcacccacgatcttggggttattgcccacttatgccagaaagtggcggtgatgcagtacgggaagatcctcgaaaccctgacggtcgatgcgctggtcagcggccaggcgcagatggcctatacgcagatggcctatacgcagatgctggttaacgccagtcggcaatatacgcgcgaaatggcgcgcgaggtggcggaatactaagctttatggcgcattgtctcacggcagatgcgcccattttaatagataactatttgatgttataggttttttgtggttgtgggtatcgtctattaatgtaagcgcggtgtttggatcgatatcctgcccaggttttttccctgcagccgcaggtgccgttttaccttaacattcagaggctcaatcaacgaacccggctgctgtataccagccgggcgccgtctttgctttgcgaagcctgatcagcgtagcagcgggcagtcgggcggcagccggcagcgcagggccgccggtaacagctccatacggaaggttttgccgctgagcggctcgccgtcgaggttaaaggtcatctcatggggcgcggttatttcaaaccacgaggagacaccgtcaacaatattaggcgagttttccggattcgccagggtgctgaacagggcagggatcagctcttcgccggtgaaaatgcgcagatgcagcagaccatcgttaatcaacgcctccggacacagctgctggccgccgccggcctggcggccgttgccgatgccgatgaccagcgcatcgccctgccagtgaaagttctccccgcggatctcgcagcggtccggcttcagggtatccatgcgcatcagaccgtggattaaataagagacaccgccgagcgcggccttgagtttttccggcgtttcggtggtgatccgggtgccgaacccgccggtcgccatattaataaagccggttttatcattcacccgggcgatatctatcggcacatcgcggccgacgatcgccagcttgagggcgctggccagatcctgcggaataccgacgctggtggcaaagtcgttagccgtgcccagcggtaaaatccctagcgccatcttgccgccgcgctccaccagcgcggtcgccacttcattaatggtgccatcgccaccgccggcgatcaccgtttcaacgttcagctgcagggcttcatcgataaaccgagcggcatcgcccttttcccaggtcacgcggacgtgaatatcaatcccttcatcgcgtaacaggttaaccgcttcgcgtagctgcggttcattggcacctttgccgttaaggatcagtaagctggcaggaaacgtagacatcatcaagggaacctttattgctcaatgttgcataaagtgtaccgcatgacgaaagcgaagaccggaggagaggcaaaaaaataagcccgcgtaagggagattacgcaggctaaggaggtggttcctggtacaactagcatttatgggttatgtttttcagcgaaatggatgatacctgtttcgatcgaaacggtatgtgatccgattctaatatccttacatcgtgaaaaaataacgcaaattaactagttaccgtgcggatttctggttgtttgaccagtaaagttgcgcatcagcagggcatactgcaggggcaggtcgtccggcacaggcaaccagacggtatagccatcgcccggggccaccggcatggtttcgcctttgccattctccatatgctcaagggtgaagttgacgttaccctgcggggtcatcagctcaaggctgtcgccgacgctgaacttatttttgaccgccacggccgccagcgggccgttacgctctccggtgaattcgccgacaaactgctggcgctcggagacggagtagccgtactcgtagttctgataatcgtcatgggtatggcggcgcaggaagccttcggtgtacccgcggtgggccagcccctccagggtctccagcaggctggtatcgaacggtttgccggcggcggcatcgtcgatcgccttgcggtaaacctgagcggtgcgcgcgcagtagtagaaagatttggtgcggccttcgatcttcagcgagtgaacgcccatctgggtcagacgctcaacgtgggcgatagcccgcagatctttcgagttcatgatgtaggtgccgtgttcgtcctcaaaggcggtcatgtattcgcccggacgtttggcttcctcaatcataaagactttatcggtcggcgcgccgatgccgagggtaggctccacggtctgcaccgggatcggctcatatttgtggacgatgttgccgacgtcgtcctctttgccttccgccacgttgtattcccagcggcaggcgttggtgcaggtcccctggttcgggtcgcgcttgttgatatacccggagagcaggcagcggccggagtaggccatacacagcgcgccgtggacgaaaatctcaatctccatctccggcacctggcggcgaatctcttcgatttcatccagcgacagttcacgcgacaggatcacgcgggtgagccccatctgctgccagaatttgaccgtcgcccagttgacggcgttggcctgcactgaaagatggatcggcatctccgggaagtgttcccgcaccagcatgattaaacccggatcggacatgatcagcgcgtccggacccatctccaccaccggcttcagatcgcgaataaacgttttcagcttggcgttatgcggggcgatgttgaccaccacatagaattttttacccagcgcgtgggcttcattgatgccgagctgcagattttcgtgattgaattcgttgttacgcacgcgcagcgagtagcgcggctggccggcatagacggcatcggcgccataggcgaaagcgtaacgcatattcttcagcgttcccgccggggagaggagttctggtttaaacatggtgttctcgttctgatgacaggtcagattcgccgcacctggtgcggcgagttggggagtgtccccacattaagggcgggcattgtagcgccgcggcgaaggggagtaaatatcagataggtatctttcagtatggctaatttgtttgccattttgaacctgggcagtactcacactgacagcgttaataacgcctggtgggataggctctagggagttccccgggttgcggcgtaaacgccttacccgggctacggattgcagatggcggtgaacgtgtagcccggcgaagcgcagcgcgagccgggaaaaggctaactacgccagccggcaggcgtccgcttcccagcggtagccaacgccatacaccgcgcggataaacgactgctcggcgtccagcgcctccagcttgcgccgcaggttcttgatgtggctgtcgatggtgcgatcggtgactacccgataatcgtcatacagatggttgagtagctgttcacgggagaacactttgcccggctcctgggagagggttttcagcagccggaactcggcgggagtgaggtccagcagcttgtcgcgccaggaggcctgaaaacgaccttcgtcgacaatcagcgggctctgggcgtccagcgcctgcagatcgcgctgcggcttgcagcggcggaggatggtttttacccgggcgaccacttcccgcgggctgtagggcttgcagatatagtcgtcggcgcctatttccagccccagcaaacggtcgatctcttcgattttcgccgtcaccatcaccaccggaacatcggagaagcggcgaatttcccggcacagcgtcagaccgtcggtaccgggcagcatcagatccagcaggatcaggtgcggcggcgtctgccggacgtagggcaggaccttgtcgccgtggttaatcaacgcaggcgcatagccggcggcctgcagataatcaatcagcagttggccgagcttcggttcatcttccacgataaggatgcgtggggtgttttcatctacaggcaattcagtcatacgtctctcggtaaatcatgttccagaggtaactcaactttaatgctaaccccgccaaaaggcgaatggtcggcacgcagggtgccgccgtgggccgctacgatattgaggcaaatcgccagcccgaggccggagccgccgctggcgcggttgcgcgatccttccgcccggtaaaagcgttcgcacaggcgggccagctgctcatcgctgacgccgggggcgctgtcggcgaagtcaatcaccagcatccggccgctgcggcgggcggtgatgtgcaggctgccgccgctgtcggtatagcgcaggctgttctccagcagattgttgaagagctgcatcaggcggtcgcggtcgccgaagatcatcgcctgctccgggagcgacacctgaatgcttagctgccggctggcgaagcgctcgcgaaaagcgcccgcggccacttccagcagggtgatgatatccagtgaggttttctggtaggccagcgccccctcgtcggacatcgacagctgatggaggtcgtccaccagcttggtgagagtagccacctcggcctgcagagagggaatcgactcgggggtaaagcgccggaccccatcctgaatcgcctccagctcgccgcgcagcaccgccagcggggtacgcagctcatgggaaatatcggccatcagatcgcgacgcatctgctggttgcgctccagggtgctggcgagctggttaaaatcctgcgccaggcggccgagctcatcgccgccggtcaccgtcacgcgggtggaaaagtcgcccgccgccagcttatgggtgccttccaccagccgcttcaccggcgccagcagaccgcgggccaacgggaaagtggccagcgcggcaagcagggtggcaagggcgacaatcagccagctggtgcgcttttgctgccggtcgaagttaatgtcggtattgcgcgtcagccgctctaccggcgaggcgatcactttgcccacctccgcgccgttgaccacgatgctgcgctgggtgccgtcctccgggacgcgctcacgcggccccaccagcacgcgccccgactgatccaccacccagaacatggtgcgccagccgtggggcggcatttccggcctcgggcgcgggccgtcaggggggccatccggcggcggcccgtccggggcggcgtccggcttcatggcgtgccccggcggcgagcggtcgtcgttatcccgttcgaaggtgcgcagtagctggaagataaagcggtcattattgcgcagaaacgcccagctgccatgctgggcatactgctcgctcagcgcgtcgctgagcatggttaagcgttgctcattgccgcgcttgatatagtcgataaacccgcgttcaaaactaatgcgcaccgcccagtgcatgctgatcagcagcacgatgcaggtggcgaatatagcgaggaaaagcttgccggtaatacccgggcgccaaaatttcacgatccactcctgttgcgtcgacggaggacggtattgctgccgacgtcatccggtacccgggaaaagatgagcgccggcagggcgatgatcgccgccatgctcagataggtgtagagaaagacctgatgggtgctggcggcgtcgaggctcatatgctgctggccatacagccccagcagcagcccggcgatggtcacgccgatactcatcgacagctgcatcaccatcgacagcaggctgttgccgctgctggccagatcgtccgggagatctttcagcgtcagggtattcatcgaggagaagcggctggcgttgatcatcccctgcagaaacaggaccagcggcagcacgtaataccagccggccagggcgctaaacataaacagcaggctgaccgccgccaggcccagggtgctggcgaccagcacccgacggtagccaaagcggttgaccacctggaccacgatccgcttcatgcccatgctgccgagcaccatcgggatcatcatcagcccggcgtgaaagggggagaagccgaggccgatctgcagaaacaccggggtcataaacggcagcatgccgctgccgatgcgtccggcgaagctgccgccgaggccgagagagaaggtgcggttgcgaaacaggttaaggctaaacaacgcccgggcgttaccgcgggcgtgccacaggtagagcagcagggcgcagaggccgacggccaccagccccgccagccaggcaggggaaatgccgagccctttctggccgtcgagcgccagggtcagggtcgccatcccggcggccagcagcagaaagccggagagatcgaagcgccgggtctgcatggtgtagttgggcatcagacagagggtggcgatcgcgccgacgatccccaccgggatattgataaggaagatccagtgccaggaggcgtactccaccagcaccccgcccagcgccgggccgagcagcggaccgacctggcccggcagggtgacgaaggtcatcgccgccatatactgatcgcgcgggacgatcttcatcaccgtcaggcggccgaccggcaccatcatcgcgccgccgaccccctgcagcacccgcgccatcaccagctggtcgagggtgctggcctgagcgcaaaacagcgatccggcggtaaacagcacgatggcggtgaagaagatattgcgcaccccgacccggtcggccagccagccgctggccggcagcatcaccgccaccgttaacacataggagacgataatcatatgcatatgcagcggactctccccgaggcttttggccatcgaggggagggcggtgttaacgatggtggtgtccagcgactgcataaagaagccgaacgccactatccatagctgccagcgcacgctggccgggaggtctgtcatgttattcgcttaccggttgagaggagtgacgcgaaaaacgcagccgcagacggtcaaagaaaagatagaccaccggcgtggtgtagagcgttaacagctggctcatcaccagaccgccgacgatggtgatccccagcggctggcgcagctcagagccatcgcccccggagagcaccagcggcagggcgccgaacagcgcagcgagggtggtcatcataatcggccggaaacgcagcaggcaggcctggaaaatcgcctcttccggcgtcaggttgccgttacgctgcgcctccagggcaaaatcaaccatcatgatggcgtttttcttaacgatgccaattaataacataatcccaatcagggcgattaggctgaacggggcatcgaagatctccagcgccagcagagcgcccaccccggcggagggcagcgtcgagaggatggtcaagggatgcacatagctctcatatagcacccccagcacgatatagaccgtggcgatagccgcgaggatcaggatcacctgcgcgttcatggtctgctggaacacctgagcggtaccggcaaaggagccgcgcacgctcgacggcaccccgagctgggtcatcgcgcggtcaatggcctcgctggcttccgacagcgagcggccggtgggcaggttaaaggagatagtgaatgccgccgacagcccctggtggttcaccgacagcggggcattggccggctgccatttggcgaagtaggccagcgggatcggcttgccgtcgctgttaatgacgaacatcttatccagggcgctgacgtcctgggtgtaggccggatccacctccatcaccaccttatactggttgagcggctggtagatggtagagatctgccgctggccaaaggcgttgttcagcaggttgttggcgtcctggacgctgatgccgaggcgcgacatggtatcccggtcatagaccaggtccatttcggcgccattgtcctgctgatccgagttgacgtccgccagctccggcagcgccgccagcgctttgcggatcttcggctcccactcgcgcagcgccgacaggtcgtcggacagcagggtgtactgatagctggcgttcgactgccggccgccgacgcggatatcctgcaccgccatcaggaacaggttggccccgggctcgttggccagctttttgcgcagccggtcgatcacctgctgcgccgtctcgtggcgctggtcgcgcggcttgagggtgataaacatcatcccgctgttgacccgcgagccgccggtaaagccggtgacgttatccaccgccggatcttcgcgaatgatcttcataaagtcctgcagcttgccgcgcatcgcctggaaggagatgctctggtcggcctgaatgccgcccatcagcaccccggtgtcctgctccgggaagaaggttttcgggatcgaaatgtagagccaaacgctgagggcgatggtgcccagcaccaccaggccggtcagccggctatgcttcagcacccattttaacgatttaccatagccgccctgcacggccaccagcaggcggccaaagccgcggttgcgcgtcggctggtggggcttgccgcttttcagcagccagccgcacatcatcggcgtcagggtgagggagaccgccagcgagatgccgatcgccaccgacagggtgacggcgaactcgcgcagcaggcggccgggcaggccgcccatcagcagcagcggcaggaacaccgccaccagcgacagactcatcgacagcacggtaaagccgacctcgcggctcccctgcagcgccgcctgcagcggtttcatccccgcctccagatggcgggagatattctccagcaccacgatagcgtcatccaccacgaagccggtggcgatggtcagggccatcagcgacaggttattgaggctgaagccgcacaaatacatcgcggcgaaggtgccgattaaggataccgggacggcgacggccgggatcagcgtggcgcgccccgagcgcaggaacaggaacaccacgaggatcaccagcgccaccgaaatcaccagcgtctgctccacctcctccagcgaggcgcggatggtcggcgagcggtcctgggcgatctgcaggtcgatagccgccggaatggtctgctgcagctccggcaggcgggcgcggatgctgtccaccgtctggataatattggcttccggcagtttgcggatcatcagcaggatcgccggtttggcgttggtcatcccggcgttgcgtacgtcctgcaccgaatccgagacggtggcgacatctcccagccgcaccgcggcgccattttgatagtggacgatcagtggctgatagtcggcggcggtcttcagctcatcgttggtctgcacctgccagcggtgcgcgctgtcctccagcgccccctgcggtttgcgcacgttggcgtcgctgatggcggtgcgcaccgcgtccagcgacacgccctggttaaacagcgcctgcgggttgaggtcgacgcgcaccgccggcagggagctgccgccgacgtcgacatcgcccacgccgtcgatctgcgcgatggtctgcgccagctgggtggaggcgaaatcatacagctcaccctgggagtaggtgtccgaggtcagcgtcaggatcatgatcggcgcatccgacggattggctttgcgataggtcggccggctgggcattccgctcggcagcaggctttgcgcggcgttgatcgccgcctgaacgtcgcgcgccgcgccgttgatatcgcggtcgaagttaaactcgagaatgatgcgggtgctgccgagcgagctggaggaggtcatctcattgaccccggcaatccgccccagggagcgctccagcggggtggccaccgacgaggccatggtctccggcgaggctcccggcagcgaggcgctaaccatgatcaccgggaagtccacctgcggcagcggggccaccggcagcagccggaagccgagaatgccgcacagggtgatggccagcgagatgaggatcgtcgccaccgggcggtaaatgaagagggcgaaaaacttcacttacgcctcctcttcctgacgcgggaagcggcgcttcaggtgcagcgacaggcggtcgaacagcagatagatcaccggggtggtgaacagggtcagcacctggctgagcatcagaccgccgaccatgccgatccccagcggacgccgcagctcggcgccgacgccggtgctcagcatcagcggcagggcgccgagcagggcggcgagggtagtcatcaggatcggccgaaaacgcagcagacaggcctggtagatcgcctcccgcggcggcatgccctgctcgcgctcagcggccagcgcgaagtcgatcatcatgatggcgttcttcttcacgatgccgatcagcagaatgatgccgatgatggcgatcacgtccagctcgctgcccgccagccacagcgccagcagcgccccgaccccggcggtgggcagggtggagagaatcgtgatcgggtggataaagctctcgtacagcacccccagcacgatatacatcgccaccaccgcggcgaccaccagccagacggtgctgccgagcgccgactggaaggccagcgagctgccctggaactgggtgcgaatatcggtcgggaaatccagcgactgttcggcggcgaggatcgcctccaccgcttcgcccagcgagtagttgtccgggacgttaaacgagatggtggtcaccgggaactgatcgaggtggttcaccgacagcggggtaaagcgctgctccaccgtggcgatggcggtcaacggcacgatgccgccgtcgctgctggtgagacggatattctccagcgccgcgaggcccggcgtcgcctcggtatcctgctcgagcaccacgcgatactgattcgcctgagtgtaaatagtggagatcagccgctggccgaaggcgttgtacagcgcgttatcgacatcggccattgagatgccgaggcggctggcgctgtcgcgatccaccttgatataggcggccaggcctttgtcctgccagtcgctgctgacgtcggccagctgcggctgggcctgcagacggctgagcagcggcggtacccaggtgctcagcgcctcgagggagtttgcctgcagggtgaactggtactgggtgcggctcaccgtagtgtcgatggtcaggtcctgggtcggctgcaggtagagcgccacgccggggacgccgtccaccgcctgctgcaggcggctaatcaccgtctggacgcggtcgtcgcgttcgtccagcggcttgaggttgatctgcagacgggcgctgttcagcgccgggttggtgccgtcgacgccgacgaaggaggtcagactctccaccgccggatccttaaggataatactggccacctgccgctggcgctcggccatgctggcgaaggagaccgactgcggcgcctggagggtgccctggataatgccgttatcctggatcgggaaaaagcctttcgggataaagacccacaggataatcgacagcgccagggtgctcagggcgacgccgagcgtcagccacggatgattcagcacccggctcagccagcggccatagacggcgatcacccgttcgaagaaacgctcgctggcccgcgagaatcggttctgcttacgcagcgattcgtggcttaacatgcgggcgcacatcatcggcgtcagggtcagggagaccaccgccgagataagaatagcgacggcaagggtgacggcgaattcgcggaacaggcggccgacgatatcgcccataaacagcagcgggatcagcaccgcgatcagcgagaaggtgagggagatgatggtgaagccgatctcccccgcgcccttcagcgcggcggccagcggcttctcgcctttttcgatatagcgcgagatgttctcgatcaccacgatggcgtcatccaccacgaagccggtggcgatggtcagggccatcagcgtcaggttattgatcgaaaagtcgaggaacaccatcaccgcgaaagtgcccaccagcgacagcggcaccgcgacgccgggaataatggtcgccggcacgttgcgcagaaacaggtagatgatcatcaccaccagggcgatggccagcatcagctcaaactgggtgtcgcgcaccgaggcgcggatgttggtggtccggtcggagaggacctgcaccttcaccgatttcggcaggctctcggtgagctgcggcagcatctggcgaatgctgtcggcggtgtcgatgatgttggcccccggctggcgctggacgttcatcacgatggcccgctgctggttggcccacgccccgagccagctgttttcggccccttgttcgacgctggcgacatcgccgagccggatcggtgccccgttctgataagcgataatcagccggcgataatcctcagcggactgcatctgatcgttagcggaaagcgtcaccgcgcgggccggaccgtcgaggctgcctttcgcggagttaacgttggcgctggtgatagcggtgcgcacggtttcgctggtcaggccgagggcggcgatggcctgggcgttaagcttcacccgcaccgccgggcgctggccgccggcgagggtcaccagaccgacgccggaaacctgggagatcttctgcgccacccgggtctccaccatgtcctcaacctgggtcatcgggatggcggaggaggtgacggcgagagtcatgatcggcggatccgccgggttcaccttgctgtagaccggcgggttgggcagatcgctcggcagcaggttggtggcggcgttaatggccgcctgcacttcctgctcggcgacgtccagcggcagggtcagctggaactgcagcgtgactaccgaggcgccgccggagctttgcgacgacatctgcttaaggccggacatctggccgaactggcgctccagcggggcggtgatggcggaggtcaccacgtccgggctggcacccggatagagggtgactacctgaatggtcgggtaatcgacctccggcagggcggagaccggcagaaagcgatagccgatgatcccggccagcaggatagccaccatcagcagagtggtggccaccggacgcataataaacagccgggacgggccgccggtgcggcctgggggtaacacctgcatcaggaacgcgctccgtgtttaccgctctggcgcggggcgggctgcgcctgctcgccgctgctggcggtgacaacttccaccttcgccccctcggtcaggcggtcaatcccgtcggtgaccacgcgatctccggcggaaagcccggcgctgatgactactttctggctgtcctggatgccgggcgtcacgctgtgtttgctgaccttattctcatcgttcagcacccatacgaaatgcccttcgttgcccatctgcagcgcggcggcagggatcaccaccgcgttctgctgggtgtccaccagcaggcgggcgttaacgaactgattggggaacagcgcgtcgtccagattgctaaagcgcgccttcagcttgatggtcccggtggtcgcatcgatctggttgtcgaggctcagcagctcgccgacgctgattttctgcttattggtgcgatcccaggcttcgacgctgagcgctttgcccgctttttgcgcctgcaccaccgtggcgatgctgctttccggcagggtaaagaccacgtcgatcgggtgcgtctgggtaaggaccacgatcccggtggtatccccgctggagatctggttgccgatatcgacctgctttaagccgacgcggccgtcaattggcgcggtaatgcgggtccagtcgagctgcagctgggcgctggcgacggccgcttcatcagctttcaccgtgccggcggattccaccaccagcgactgctgagtgtcgagctcctggcgggagacgaggttggtcttcaccagctgctggtaacgagcgagatcgcggcgggcgttggcaagggtggcctgatctttcgccagctgaccctgcgcctgggcgagagcgactttaaactggctggggtcgatctgcgccagcaggtcgccggctttgacctgctgaccctcctggaagtgaaggctcagcagttggccgtcgacccggctgcggacggtgacggtgttggccgccgtcaccgtacccagcccggtgagatagcgcgggaccgcttcttcggtggcggtggccgcctgcaccggcgccagcgcggcgccaaagcggccatggcgtgcgccgcccggcccctgcgggccctgtccggcggcgggagccccgctgccgctcgtcccgcgatcgtgccagaaccagtaggcggccccggcgataatcactaccgccagcgcggcgccccaacgacgtatgttactgcctttcattagtttacggtctcatcctgaagcgtttcgctgaatgatactagtttagtgagggaaggggccgtaaaaatggaggaattatgaaaagaaggttgagaaatgtctggataaccgccgcgacgccgggcgctcccgcggccgatatccggggtgatatcaacttttagtttaaaaaagcaaaaaatagttgtatccgcgggggctttaattagatttatgcggtgaataaatcagtgcattctcataataataaaatatgcacttaaaaatcaacgtgttaaataatcaggggtcattgctgtggcaaacgcaaacaaactcacgctcttcatcgtcatttttatgctgatggggatcctctccggcgcggctatccatgcctacgcgacgccaaccaccgtctccgcctgggcggacaacattacgctgctcaccgatctgtttctgcggttgatcaaaatggtcatcgcgccgttggtgttcagcaccctgacggtcggcattatgcgcctcggcgagacggcgaccatcggccgggtaggcggcaaggcgatggtctggttcatcacctcctcggtattatccattctcgtcgggctggtgatcgtcaccttccagcacccgggcgccgggttaaacctggcggtgccgaaagaggcggtggataccggcctggcggtcagcggcatgagcctgaaagggttcctgtcgcacaccatccccaccagcatcaccgaggcgatggccaacaacgagatcctgcagatcgtggtgttctcgatgttcttcggcatcgccggcgcgtcgctgggggagaagtttaatgctccgctggtggcggcccttaacgtggtgtcgcacattatgctgaaggtgacgggctatgtgatgtacgttgcgccgctggccatcttcgccgccatctcgtcggtgattgcctcccaggggctggggatcctgctcaactatgcttcgttcatcggcggctactacctggcggtgctgttgaccagctcggtgctgattgccgtcggctatatggtgctgaaaaaagaggttttccgcctgctgaacatgctgaaagatccggtgctggtggccttcaccaccagcagctcggaagcggcctatccgaagaccctcgagcgactggtgaagtttggctgctcgcgcaatatcgtctcgttcgtcctgccgattggctactcgttcaacctcgtgggctcgatggtctactgctccttcgccgcgatgtttatcgcccaggcctataacgtgccgctgagctttagcgagattacggtcatgatgctgaccctgatgctggcctcgaaaggtatcgccggggtgccgcgttcggcgctggtggtgctggcggcgacgatccccagcttcaatataccggtcgccgggatcctgctgctgatgggtatcgaccatttcctcgacatggggcgctccgccatcaacgtgctgggtaatggcatcgccaccgcgatgctgtcgaaaaatgaagggttgctgaccgacgaggaagcgcagccggactgggaagtggagaaagcggaagcctgatcctgccgcgccctttcactgagggcgctattccacacggaaaaaaagacccctgacaggcacgtcaggggcaatgtgacgaagtatcagttttcctcgtgtagcgtgttttttattatataaagacgggcggtaacgtctttataccgaggaagcgtcagagtttaacgttatgtccgccagcgctggatattttttagcatcctgcgactattttcggatttacgacaatatagccaggtcaatatcttatttttttgtgctgctgtttgcctaccagcgctcacgtaaaagattcataaactggaaaaattcatgattattattcaggctgtatttttccatgatcttattcttatgataggcggcggtgcggggactcacacgctgcagggcggcgattttactcatatccagcccttcgagaataccgtgcactacggcggtctgcgatcgcgataacacgcgatgcggacagctggcgcagctgagttcccggcctgcggcgtcggtagccgtgggggtcatacaatgctgaagctcgcttttaatgatcgtcagcaattgcggaatactggccgtttttagcgaaacaaaaatgacccctttcaggcagttaatcatgaactcatcttccggcagctggtcatagctatggagaataatcagcgagctacctctttttctgttcttaatcagggtattacacaggtatatttccccggggatcacttcgcagataatgatatcttcagctgacagatcggtgttacgccaggaaaaacgcgcccgcagatcgccccgggtgaggtcattgaccatggccaccagcgattcacggacaaaggcgttgcgggtgttgatggtgacattaatgtttctcatggcgttatttccttacgcaaaacataacgccatgctgtgacaaatcctccgggcgtatgcggtgtgttgaagatataaaagcacctacaataattttttattattttaaagtgaattatttacgacgcatcgaacgcttatcgttaaaagtaaatttctgccgcctcctgtctttcagataggaaataaaactgtatacagagatgctgaagaaaaaaatgcatagcaataaaactaaccacgtttgcatggccatcgtttttaccctgattgtgttgcatggtgtcagaatttgccgcgaacggctaatacgttttgttatatgcttttctgtcccgtgaaaatcttacgccatcatcctgatgtgctagcactataagaaagttcttaaggtcatcgtcagtctcattcctctcatttctctcagaaaatgagaaaaattaacacttacgagttttttatatcccgcgcggccgccgacgagccccgtcgttcaggaaataaaggccagtcccttaccaaagattgcgcgaacgggcaggtggatcccctgctggcgtgccttgtgacgcaggcggctaaccaccacgtcgatccggtgcaggtcaggctcgctttcatgggaaaacaggcaggcatggagatccagtttgctgcacacttcgttgcgattgcgcatcaggagctccaccaggcgatattcctgctgggttaactccagcgtccgggcgtcgggtgaaatcagtttatcctcttgcagacgccagctgccgggggagacggccggcggcgtgccgatcgcctccgcaggcggagccgccggacggtcctggcgcaggcgcgcgccgagggcggtgagggtctcggcaagatgggcgaagtttaccggtttgatcagataggcatcggccccaaggctcagcgcctgcaatttatcctgttgctgaccgcgggcgctgaccaccaccagaccgtagtgccccagctcatgcagatagttcagtacgctgaagccatcctcgccgggcaggccgatatcaaccagcacgatatccaccggatggctgtgcagttgccgccagaaggcttcggcgctacgcgtcccccacacctcgaagccgcgatagcccagccaggccagcagttcatccagcagatcggcgttatcttcaattatcgccagccgtaaagccatacgtcgttctcctcttaagcaaccgtggggagggtgagaataaaggtgcagccgtccgggccatgctcggccagccacagtttgccatcatgagcctgcactatctgacgcgcaacatacagtccgagaccggtgccgcctggcaccggcgatgtgtgctcgccgcggcggtagcgctcaaagatcagttccgcctgtccggcggggagtcccgggccgtggtcgcgaatgcgtagctccgtttgcccggcatcggaatgaatatcgatggcgatttcaccggggggcgaatacttgacggcgttatccagcagattagcgatggcgatgcacagcaggccggcatcggcctgcagctgcgggctttccaccgcgccgtgctggcggatgttcaggtagtgatcatgggagatggccaccaccgaggcggccatgttgatcaccgttagcagggcggtctgctggcgctcgacgtgcagatcgtgggaggcgagccgggcgtcggcaaggcagttatcggtgagctgcaccaggcgggtggcggcgcggccgatgcgatcgaagcgcgcctcctggctggtcgaggccgccgagaggcgaagattctccagcgcagcctggatcaccgccagcggggtgcggaattcgtgcgccaccatgcccataaactgccgctggtggaagctggcttcacgctcaatctgcagttcgcgcgccaggcgctgcttctgctccagctggcggttttcagcacgcacccgcaggatggcaatgatcagcaccgtaatgatgtggacgatcagcgcgtactgccagagggaatagatcgccatatggaacgggataatcccatggatcgacaactgcaccagcaccgcggcgacgacatagaacggcggcagcagacccagcagcagggtggtacggtcgatagcttttttgcgccacagccaccaggaggtgaacagcagcaccggggtgataatgatgaatactaccccttcaatctgcatcgcgaagccgtaaaacccgagcggaatactgacctgcagcaccaggttgagtatcacggcggcgatcagcagctgatgaagtcgcggcatattcttcttcagatcaaaaatctcgctatgcagccagagggcggtggcatagctgaacagcgagaggctactgatcataaaatcctggaacggcagcgcggcgtggccgaagaaccactccgggaagccgtgcagagcggccaccagcggataattgagcgagaaaagacagatgccccatagcaaacgccggcgcagggccagcgccagccaaagcgccacaccgctggcgacagcggccaggccgaagtagaagctccagaaagcggtgtcagcggtggcccgctgcacaaacgcctgcgcagaggagagcgaggccagcaggatcagggtgctggtgctctgcaggcgaaagaccagctcatagccggcggcggttggcggcgggggcagtatcagcaccctttcccgataatgcagatcgcttccgcgggcgccgtcgcgatcgccaaagatgcgctgcgtccacgggccatcgctgcccagtggccggtagtaaatggtcagatggtcgacgaaagtggggcccagctgcagccaacgcggctccccggcaaaccacgtgcccggcagctcgctgcgcagccaccaggtttttcgcgaataaccaaaggaggggatctgccgggtggtggcgagctggtctgcgggcagggcggcaaaacgatcgagggtcatctggccgctgtcgtcggcgtaccactgaaccggaatatcaatccccacctggcgcgtcgccgcctgcgcctgcggggcgaccagcagcaagagtaatccacagctgagcagccagcctgccaggagccgcggccggcaacgccggaccgccgcgaagatcgcagacacccttttcaatcacgcccccttgcggcatgcaaagattactgaccgcagacgtctggctacggtatggataatacgcccccggaagcgggggagagtggacaggcctgtccggacgaacaggccattttgcgtgggagaccaggaatattccagcgtaatctgcagcgccaggatcaggacagacctgctgcgcggcagcgccgggcgagggctagcggaaaactacctgcgcccagcgggccagcccggcggtcaccgagccaaaatcatcgccgccggccagcggaatacccggcagctgagcggccagcgcctttttgatcagcggcgaacgggcgctgccgccggtaagatagatcacatccggggtggtctggctgctgtcgagcgcgagccgcacctgttccataatgcgggtcaggggctgatccagcgcggcttccagaccctgctgggcgatggcggtggccagatcgtcctgaataaacggcagcgcggtttcgacgctggcggcgctggagagggcgattttgctctcttcggcgctgcgcaccagacgatagctgagacgctggcgccagaccttcagcagtagagccaccttgtcggcatcccgggcgctgcgcagcagatcgttcagcaggcggccgttggcggtgctgtagaaatcgctctgcgccggcacgtcgttgatcgccaccgcgttccaccacgggaggatcggcagcgcggtgcctttctccgtttcgccacccatgccgagaaggggcatcaggcatttgaaggccagggcaatgtcgagatcgttaccgccgatgcggcagccgctgtggccgagcaggctctgctggcggtcggcgcgctcccgccattgcgggcccatcagcagcagggagcagtcggtggtcccgccgccgatatcgacgaccagcacccgcttttcttcactgagggtcgcttcgaaatcgagcccggcggccaccggttcaaactgaaagaccacatcgcggaaaccggcgcggtgggcggcccgctcaaggatcccctgcgcctgggcgttcgcctcatcgccgccgaggccctggaagttaatcggtcggccaatcaccgcctggtcgatctgctcgggcagctggctttcggcctgcaacttaatatgcagcatcatggcgcagaccaggtcttcaaacagggccacctgctgcggcttcagcccgctggcgccgaggaaggatttgggcgatttaacgaagtagacctcttgcggatcttcaacatactgctgcagcgaggcgagaccgaactgcacgctgttgcgcagcacctcgatgtcttcgtcgcggttggcggcgatggcccgacgcagcagcgcctggttttcgtcgctgtgggtggggacatcatgatggcgatagagccactcgctgaccgcttcgcgcgtcggcgcgcagagcatggagggcagcagggcgctgtcgttttccagcgttaacagctggggggtattttcccgcatcacggccaccgaacagttggcggtgccgtagtcaaaaccaataaacatcgtctgcaaaatccccatgccggtgaagaaggggggcgactttagcggatcgtcgccatgccgacaaccggaatttaaaagcaaggcgctgacggtcaagggcgactatcattgaaacgctatataaaggagagcttatggtgctgttaccctggaccccgccctatgactgggcgtggatggttggttttctgcaggcgcgcgcggttgccggcgtcgagcgttttcacgatgggggctacagccgcagctttggcgtggaaggccaccgcgggctgattcatctggcgccggacgaagaggcgcagggcctgcgggtgaccctttccccgggactgcagccggtagcggagatctgctatgcgcgaattggccagctgtttgatttagcctgcgacccgcggcaggtcgctcgcacgctgggcgatctggcgcaggcgcggccggggctgcgcctgccgggggcgctggatgccttcgagcaggcggtgcgcgcggtgctgggccagctggtgagcgtggcgatggccgcccggctcaccgccaaagtggcggctggctggggcgaaccgcttgcagaggcgcctggatacgtcttgttcccgacgccagaggccctgtcccgggccgatccgcaggcgctgaaggcgctggggatgccgctgcgccgcgcggaggcgctgatccacctcgcccgggcggcgctcagcggcgagctgcccctgacggcgccggcggatattgacgccgggctgcgtcaactgcagactctgcccgggattggccgctggacggcaaactactttgccctgcgcggctggcaggcgaaagatatctttttgccggatgattacctgattaaacagcgctttccgggaatgaccccggccgccatcgcccgctatgcccgccgctggcagccgatgcgatcctacgcgctgttgcatatctggtataccgatgactgggcgccggcggcggaatagccgcccggggcgcataccactggtatcgggacgctgaaatccctataattgccgcgtttggcggtccgccgccaccctccatctctatccaggttaatcaggtcgcaaaaatttatgactgatatgtcccatcagtgcgtcattgtaggcatcgccggcgcatcggcttctggcaaaagtcttatcgccagtactctctatcgcgaattgcgtgaacaagttggcgacgaacatattggcgtcattccggaagacagctattacaaagatcaaagccatctgtcgatggaagagcgcgtcaaaaccaactatgaccacccgagctcaatggaccacagtctgttgttccagcatttgcagatgctgaaaagcggccagccgattgaactgccggtctatagctacgtcgagcatacccgcacgccgaacaccattcacgtcgagccgaagaaggtgattatccttgaagggatcctgctgctgaccgacgcgcgcctgcgtaacgagctcaacttctctattttcgtcgacacccctctcgatatttgcctgatgcgccgtattaagcgcgacgttaacgagcgcggccgctccatggactcggtgatggcccagtatcagaaaaccgtgcgcccgatgttcctgcagtttattgaaccgtcgaagcagtatgccgacatcatcgtgccgcgcggcggcaaaaaccgcatcgctattgatattctgaaggccaaaatcagtcagttctttgaataacctggccgaattgtgtaacgtgcaaagagtagccctgttgccctctccgccgcgaagcgtgcgggaagcagccttataaggagaaagcccatgcgtctgtgtgaccgagatatcgaagcctggttggatgaagggcgactcgccatcaatccgcgtccgcccgttgagcgtattaatggcgcgacggttgatgtacggctgggtaataaattccgcaccttccgtggccacacggcgccgtttatcgatttaagcggcccgaaggccgaggtcagcgccgcgctggaccgcgtgatgagcgaagagatcgtcctgccggaaggggaggcctttttcctgcatccgggcgaactggcgctggcggtgacctacgagtctgtcaccctgcctgccgacctggtaggctggctggacggacgctcctcgctggcgcgcctggggctgatggtgcacgttaccgcgcaccgtatcgatccaggctggtccggctgcatcgtgcttgagttttacaactccggcaagctgccgctggcgctgcgcccggggatgcccatcggcgcgctgagctgtgaaccgttatcgggcccggcggcccggccgtataaccgccgtgaagacgccaaatatcgcgaccagcagggtgcggtggcgagccgaatcgacaaggattgataacgtcaacggggtgttgctgagggtgccatgagacgaatactgacaacgctgatgatcctgctggcggtcattgtcgccgggcttacctcgttggtattgctggtcaatcccaacgattttcgcgcctatatggtgcatgaggtggcagagcgcagcggttatcagcttgaccttgatggcccgctgcgctggcacgtctggccgcagctcagcattctcagcggacggatgacgctgaccgcccgaggcgccgaagagccggtgatccgcgccgacaatatgcgcctcgacgtggcgctgctgccgctgctctcgcatcagctgcaggtgaagcaggtgatgctcaagggcgcggtgatccagctgaccccgaaaaccgaggcggttcgcgacagctcagcgccggtggtgccgcatgacaacaccctgccgctggccccggaggatcgcggatggtcctacgatgtgcgtcagctgcaggtggccgacagcgtgctcttcttccagcatgagaacggcgagcaggtgaccgtgcgcgatatccgtctgcagatggagcaggatgagaatcaccgggccaccgtggatttctccggccgggtgaaccgcgaccagcgcgacctggcgctgaacttctccgccaccgtgcagggcggcgattatccgcactccttaaaagccgactttacccagcttagctggcagctgcgcggcgccgagctcccaccggacggcattaatggtcagggaagtctgcaggccagctggcaggaagatgacaagaccctgcgttttgacaacctgaatctgatggctaaccgcagcaccgttaccggcagcggcagcgtggtgctgggggatcgcccggactggtcattggatctgcacgccaccactctcgatctcgatagtctgctggcgcaaaggtcgccggcgacggacagtagcgccagtcagcagggccagagtcagacacggccgctgcgcccggtgatcgccgacagtgatgagcgcgaagattaccagagcctgcgcggcttcaacggccgaatggccctgagcgccgaccagctgcagtggcgcggtctgaacttcacccaggtgcagagcgaaatcagcaaccagcaggggctgctgacggtcagcaaaatgcagggcaatcttgacggcgggcagctctctctccctggcaccctggatgcccgcggcgacccgccgctggcgacgttccagccggcgctgcggaatgttgagatcggttcgctgatcaaagcctttaactattccttaaacctgaccggcaagctgtcgctgagcggcgaattttccggaacgcgcattgacgccgatgatttccgtcgccactggcagggacaggctcagctccagatggccgatacccgcaccgaagggctgaacttccagcagctggtgcagcaggccgtggagcgcagcaccaacgtgcgggcgcaggaaaattacgacaatgccacccgcctggattccgtgagcagccggctgacgctggataacgggctggtgacgctgaaccgcctgcaggggcagtccgacgtgatggcgatgaccggcgaaggacagctcgatctgcagaaagagaactgcgatatgcgcttcaacgtgcgcgtgctcggcggctggaaaggggagggcaagcttatcgaccgcctgaaacagaccgctatcccgctgcgcatctacggcgagtggcagtcgctgagctacagtctgcaggtcgatcagatcctgcgcaaacagctgcaggatgaagcgaagcagcgcctcaacgactgggttgagcgtaataaaggcagcaaagacggcaacgatgccaaaaagctgcttgataagctgtaattcctaccaccgcggcccggaagtttccgggctgtgtgcttatcgtcaacgtttgatgtcacgatgatgccgggtggcggctgcgcctgacccggcctggattatacggtgggagtcatcccccgattaattcgccatcccgtaggcctgataagcgaagcgccatcaggcagtgtggcggctacgcctgacccggcctggattatacggtgggtgtcatcccccgattagctcgccatcccgtaggcctggtaagcgcagcgccatcaggcagtgtggcagctacgcctgacccggcctggattatacggtgggtgtcataccccgattagttcgccatcccgtaggcctgataagcgaagcgccatcggcagtgtggcggctacgcctgacccggcctggattatacggtgggtgtcatcccccgattagttcgccatcccgtaggcctgataagcgaagcgccatcaggcattaaacaggatatctggctatcaattttacggcccgggataccccgggccgttttatgcctgacgattacacctcataatccagctcatcctgctttaccggcgggacgatctgcaccttctgcacccgatggctgtcgacctgcagcgtgcgcagggtatagccgtcaatctcaatggtttcccccacctgcggcacatgctgcaaatactccatcaacagaccggcaacggtgtgatactcacgtttatcatccagcggcagcggaacgtactgcaccaggtcctccagcggcatatggccattgaccgtccacgaaccgtcctgatgatgctgaatatcgtgccgggcatcgatctcctccacctcattgggcagattaccggcgatggtctccatcacgtcgctgagggtcacaatcccctcgacggagccaaactcatcgaccacaaaggcaaaatgggtgcgggcctggcggaactgctcgagcgccgagaggagcggcagcccctccgggaagaccagcggttgacgcaccagcgcctgcagatccagcggctcctgacgcagggactgctggagcaggtcaataacatgcaccacccccagcagatcttcattatccttcccgccggtgaccaccagccgggtatgctgatttttctccaccaggctgcggatctcttcctccggcgcgctaaggttgatgcgctcgatatcatggcgcgacgtcataatactgctgacgctgcgctgattaaggttcagcacccgctcaatcatcagtctttcctgcggattaaacagtggatgttgatcctgatcggcgaccagcgacgccgtgtcagcatccagttcagctttttctttctgcccgctcagcagattcatcaccgcttcggtagtgcgctgacgcagcgtcatattggcggagaggaagcgacggcggttaaactgcgccagctggttaagggcttcaatcattaccgagaagccaatggccgcatatagatagcctttcggaataataaagctgaagccttcagcaatcagactgaagccgatcatcagcaggaagctcagacagaggatcacgatggtcgggtggctgttaacgaagcgcgtcagcgccttgctggccatcagcatcaggctgatggcgataaccacggcggccatcatcaccgccaggtgatcgaccatgccgacggcggtgatcaccgagtcaagcgagaagatggcgtcgagcaccacgatctgcgccacgacggcccagaatttcgcccctttgcgctgggtggggttatcgctgtctttcccctccagccgctcattaagctcgacggtcgctttaaacagcagaaacaggccgccaaacagcataatcaaatcgcgagcgctaaagctgaagtcgtgaaaaacaatcagcggtttggtcagggtgaccagccaggagatagagaccagaagcaggagacgcatgaccatcgccagcatcaggccagtgatccgcgcgcggtcgcgctgggcgggagggagtttctcggcgaggatagcgataaagaccaggttatcgatacccaacaccagttcgataaccaccagcgtgacgagacctgcccagattgacggatcggcaatccattccatatgtattaaaacctgtacgactgcggtatgtgttaccacgatcatggataagatgagtctaaaatgcaataacgacgcggatatcgccctgccgtggatggatatatttccagtggattaagcgaaccgataagaattatgttccggaaaagaacagtgaaaaaataacaccatggcggcgaccatggaataagcttgccgatatcagaactttttccgctgcgtttcagcgagggcggcaaaagggcttcctcccgcggttcgtcacggtgagcgcggatgcgcagagcagaagcgaagcgcgaagcccgctcacaaaaccggcataattcatattatgaagtgagtgcagaatagggcggatcgcggttcaccgccgcggattcaggctaatatgtcgtcatatccggctgtttatgctgaaatatattgcctggcgaaatttattatctatatctattctttccgggcatacgcgcggtgcggcgggtccggcggccaacagactccgatggacgggcctctcagccacatcgcgcggcgcaaaggaacgagccgctgaataacctgaacgagaataagattattctcacttctaactgttgataaaagggagttgtgtgtattcttttacgtgacagtgaatttaagaatttggcgggcagatgcctgggcagtatccgtgtattatcagtttcaatggatttgtgacatgtacaattttgcaaaaccgcgtgttttgcaaccaaacaggtgaagatgaatatggcgaatttgaaagcggttattccggtcgcaggactaggcatgcatatgctgccggccacaaaggcaattccaaaggagatgctgccgatcgttgataagccaatgattcagtacatcgttgacgaaatcgtcgccgccgggatcaaagagattgttctggtgacgcactcctcgaagaacgcggtggaaaaccacttcgacacctcctacgagctggaagccctgcttgaacagcgcgtgaagcgccagctgctggcggaagtgcaggccatttgcccgccgggcgtgaccatcatgaacgtgcgtcaggcgcagccgctgggcctgggccactccatcctctgcgcccgcccggtagtcggcgacaacccgtttgtggtggtcctgccggatatcatccttgacggcggcaccgctgacccgctgcgctataacctcgccgctatgatcgcccgctttaacgagaccggccgcagccaggtgctggcgaaacgtatgccgggcgatctctccgaatactccgtcatccagaccaaagagccgatggtggctgaaggccaggtggcgcgtatcgtcgagtttattgaaaaaccggacgaaccgcagaccctggactccgatctgatggcggtggggcgctacgtgctgtcggcggatatctgggccgaactggaacgtaccgagccgggcgcatggggccgtatccagctgaccgacgccattgccgaactggcgaagaagcagtccgtcgacgcgatgctgatgaccggcgaaagctacgactgcgggaagaaaatgggctacatgcaggccttcgttacctacggaatgcgtaacctgaaagaaggcgccaaattccgcgaaagcattaaaaaactgctggcctgagcgccagcctgaaaccgagcggcaaggctgaagcattcgtcctgccgctcataacgttatgcagaaattattcataacgtgaatgttataacgattgtaaagaaacgtatggcttcggagacttctggtagtttgtctctggcctctgtggtgcaatggtcggagtagcggcaataatgctttatgaatagtcacttagtgcgacaattcctaaagcgaagggaaagcggtcaacgacagccaaaaataaaacttgactgcgatcatgtttccgctttaaacatctcacttgcatgcataaaaatgtgaaatgaattggcatgcgagctggtacagacattacggataatccctgagcacggcagtggacatcatcgaaggatcacaggtatatgaactggcaactcatctcattttttggcgatagcaccgttttgctgcccagcgcagcggcgctgtttattgtcctgatgctgcgtaaaacgtcgcggttgctggcgtggcagtggagtttgctgttcggcatcaccggcgctatcgtctgcgcctccaaactggcctttatgggctggggtctgggtattcgcgagctggattacaccggcttcagcggccactccgcgctctccgcggccttctggcctatcttcctgtggctgctcagcgcccgtttctccgccggtctgcgtaaagcggccattattaccggctatgttctggccgccgtggtgggctattcgcggctggtcatccatgcgcattccgtctcggaagtgatcgccggcctgctgctgggcgctgccggcagcgctttgttcctgctgctgcaaaaacgcacttctgactgcgattataagacagtaccctggggtggaattgcatgcctagtaatggtcccactgatactgttgcatagcggcagtaaagcgccgacacagaccctgctggggcaaatcgccaccgcaattgggccgctggataaaccttttaccagagaggacctgcataagcaggcctggtaatcgccatttgttttacaggggaaattaagttttcgccggttaattagacaaataagaaaataatctactatatacccggtaattgataattcatatttatgaaataatgaagtgctactacattgttaatgcatatttgtctggatatagctttgatcagacgtttcttaaatgcgctgagacgttacctgatgcacattcaatgaatatccagatactggaaactattagaaattgtagttgactataacgccatcatctgatttttgcatgaagatgagctatgggaaaagacgtttttttacagtcagttagctacatatgtgatgatgtagcagtaccgggaagatttctaaccctggaagtcagtgaataatcttaattggtgacccgcttattttttgtcagtagaacgacaggcggcattaattggcagatattcggtaacaacactcccaattgtgaccgaaatcccgtaaacttaacgccgccaaaaataatggcctgaccaattattcatccacaggtcgataaaaaattaagtcgttcaggtagtcagtgcgctggtagctgttaagccaggggcggtagcgtcgctgaagccgcttgctgctgcacagaggttctcttcaacggctgtaaaatcgtcccggtcaggatgatcgccctcaatagatatctatcaattttctacggatatcctcagaagttggccaggagcggctgctgatatcgcctggacattaactttcctgtctcatcgatagcctgtagggtaaaattcgcctacattgtgagctgagtggatgttataaggctaacaagcagcttagggtaaatgtacttgcctcgccggtgttgcacagcgaagtcagctggtgccgcgagcgctttctatcttggtattcccctcattctcattgagatacgacagcggggctgaaaatggatcttgtacaatgataaaaattgcgcgcattgccgtgacgttgggtttgctttcctcactgggagcccaggcttacgcggccgggttagtggtaaatgacaacgacttgcgtaacgacctggcctggctttccgatcgcggggtcatccatctgagcctgtcgacgtggccgctgagccaggaagagatcgcccgggcgctgaaaaaggccaaaccttcctactcttctgagcaagtggtgctggcgcgtatcaaccagcgactgtctgccttaaaagcggatttccgggtcaccggctacacttcaaccgatcagccgggcactccgcaggggtttggtcagacgcagccagcggataactcgttaggcctggcattcaacaacagcggcgagtggtgggatatccatctccagggcaacgttgaagggggagagcggatcagcaacggatcgcgcttcaacgccaacggcgcatacggcgcggtgaagttctggaaccagtggctctcttttggccaggtaccacagtggtgggggcctggctatgaaggtagcctgattcgcggggatgcaatgcgaccgatgaccggtttcctgatgcagcgagccgagcaggcggcgccagagacctggtggctgcgctgggtggggccatggcagtatcagatctctgccagccagatgaatcaatataccgcagtgccccatgccaaaattatcggcggtcgtttcactttctcaccattccagtcactggaattaggtgcgtcgcgcattatgcaatggggggggcaagggcgccctgaatcactcagcaacttctgggatggtttaacaggcaaggataataccgccgcaaacgatcccaatgaaccggggaaccaacttgctgggttcgattttaagttcaaactcgagccgactcttggctggccggtgagcttctacgggcagatgatcggcgaggatgagtctggttttttgccttcagcaaatatgttccttggcggtgttgaaggacaccatgggtggggcaaagatgcggttaactggtacgtggaagcgcatgacacgcgtaccaatatgagccgaaccaattacagttatacccatcatatctataaggatggctactatcagcagggctatccgctgggtgacgcaatgggcggggatggtcagcttatcgcaggaaaagttgagcttattacggaggataaccagcgctggagctcgcgcttagtatacgcgaaggttaaccctgagaatcagtcgatcaacaaagcgttccctcatgcggatactctgaaaggtgtacagctgggctggagcggagatgtttatcggtcggttcgtttgaatacctccctctggtacaccaatgctaacaatagcgacagcgacgacgttggagccagcgcagggatagaaataccgtttagtttataaggctgaatgctgaaaacaggggagagagggtggtagccctgcaggacgcagtcagcttttatctctccacaagccggcagggaagtaacggctatgacagctgctcaggaattggcaaattttgatttactgatgatgtgacattatgaagaaaaaacttgttagattttcggcattagcattggcaattgggtttttatcgggttgtacgattatccctggtcaaggattaaacagtctgcgtaagaacgtagtcgaacttccggatagcgactacgacctggataaactcgttaacgtttatccgatgacacctgggttggttgatcaattacgacccgaagcagtgttagcaaaatcaaatcccgatttagatagactgcttggcaactatgagtatcgaattggtgtaggcgatgtgttaatggtgactgtttgggaccatcctgaattgactacgccagctgggcagtaccggagtgcaagtgatacaggcaactgggtgaactcagatggcacgatattttacccgtatataggtaagattaaagttgcaggtaaaactttatcacaagtacgtcaggaaatcgcaagtcgtctaactacttacatagaaagcccacaagtcgacgtaagcattgcagcgttccgttcacaaaaggtatacgtaacgggggaagttgcaaagtctggacaacaacctataacaaatattccccttacgataatggatgcaattaatgccgctggcggtttagcaccggaggcggattggcggaatgtagtattaacacataatggaaaagacataaaaatttcattatatgctttaatgcaaaaaggcgacctaacacagaaccatttattgtatccgggtgatatactttttattcctcgaaacgatgatttaaaagtatttgtcatgggggaagttggtaagcaaacaacactcaaaatggatcgcagtggtatgacccttatggaggctgtcggaagggctgagggaatatcacaggcgatgagtgatgcaactgggatatttgttatacgtcaattaaaaaataataatggcggtaaaatagctaatatctatcaactcaatgcgcaagacgcatcagccatggtattaggcactgaatttcaattagaaccttatgatatagtttatgttactgcagcgcctattgtaaggtggaatcgcgttatatcacaacttgttccaaccataacaggtgttcatgatatgactgaaactgtccgttatattaaaaattggaattgattatgtttgactcgattcttgttgtttgtactggtaatatttgtcgctctccaatgggagagcgatatttacaaagtttgctacctaacaaaaaaatagattcggcaggaactggagccttggtagggcatgaagctgatcctactgcttctcgtatagcacaaaattatggcatatccttatcaaatcattgtgcaaaacaattcacaagtactttaggaagaaaatacgatctcatattagctatggagaaggaacacatagagaaaataagtcaaattgcacctgaagttagagggaaaacgatgctgtttggccattgggcagaatataaggatatacctgacccgtatcgcaaaagtgaagaggtatttactttgatttttgaattaattaaacagtccggtgatatctgggccaaaaaactgagcgtataacaaccggggtttaatacatgtcatcacttaaaaataagccagaaaacaaagatgcagatgaaatagatttgagtcgtttatatggtgaacttatcgatcatcgtaaactaattatatcagtaactgctttttttactttgattgctttagtctattcattattttcaactccgatctatcaagctgattctctaatccaagttgaacaaaagcaggcgaatgccatattgagcaatttgagccaaatgcttccggatagtcagccacaatctgcacctgagatcactcttctccaatcaagaatgattttagggaaaacggttgacgatttgaatctgcaagccaaaattaaacaaaattattttccgattttggggagaggattttcacgtctctcaggagataaaccaggtattataaatgtatcaagattatatttacctaaaaccgatgatgacataccagaattaacgctaacagttattgacgcaaataaattcactattcagaccgattcatttgaagctgaagtaaaagttggagagttatttgagaaaaataacatttcgttaaaggtagatgaaattcaagcaaagccaggtacttcatttacggttgaatatctaagcaagctaaaagctattaatgatttaagggatgtgttgacagtaagcgatcaaggtaaagatactggaatgcttacattgtcattgacaggagatgatcctgtacagattaggaaaatattagatagcatcagtaataattatttgatgcaaaatattgacagacaagcagctcaagatgctaaaagcctagagtttttaaataggcagttaccacaagtacgtcatgatttagatatttcagaagataaattaaataaatacaggcaacagaaagattctgtagatttatcgcttgaagcaaaagcagttttggatcaaatagtcaatgttgataatcagcttaatgaactaaccatacgtgaatcagaggtatcacaacatttcacgaaagagcatcctacttataaggctcttatggagaaaagagtgacgcttcttgaagagaaagccaagctcaataaaagagtatcggccatgccagaaacacaacaagaggtgttacgactaagtcgtgatgttgattctggtcgcgctgtgtatatgcagttattaaatcgtcaacaagaattgaatattgctaagtcaagtgctattggaaatgtaagagttattgatgaagctgtaacacaaccaagaccagtagcacctaaaaaaatattaatagttataggtggtattatatttggcctgattgtttcagtggcaattattgctttgagagttttcttgcgccgtggaattgaatcgccagagcaattggaggtactaggcattaatgtatatgctagtattccagtttctgagacatttgcaaagaatatcacaaagggtttaaaatctaataagaaaaagagtctggagtatgacgagtttctggccatccaaaatccagctgacctcgcaattgaagccatcaggggattaagaacaagtttacattttgctatgatggaagcgaggaataatatacttatgatttcaggggctagcccaaatgcaggcaagactttcgtaagttcaaatttagcagcaattatttctcaaacaggtaaaaaagttctcttccttgatgctgacttaagaaaaggttatacgcataagttattcaatgtatctaacgaaaacggtctttcggattatttagcaggaaaagtagatataaaaaattgcgtgaaacaaattaaaacagctggctttgatttcatatccagagggatggtgccgcccaacccagcagaattattaatgcattcaagattccagaatcttctttcatgggcgagtgacaattatgatttagtaattgtagatactccgccgattttggcagtaacagatgcagctattattggcaattatgcaggtactactcttttagtcgcaagatttgaacaaaatacagtaaaagaaatagaagtcagtgcaaagcgctttgaacagagcggagtaatgattaaaggctgtatattaaatggagtggtaaagaaagcaagcagttattatgggtatggttatagccattatggctattcttactccaataaagagtaaagcacaaaccatcagtacagtattcacaaattgtactgatggttgattctaactttaatgaaagtgatttgtttatgagaataatgattttaaactctctttattatccttatagagtcggaggtgcagaaatatcagttcaattattagctgaacaattagttaaattagagaatgaagtaaaggtaataacacttcatgataaaaaagaaataaaaacagattttgtcaatggagttgaggtcacttatcttcctcttaagaatatttattggggtttccccaacacaacaacatcaaaatttaaaaaggccatctggcatttcattgattgttataattttgaaatgaaaaaaatggtaagcgtacagatcgcgcaatttaaaccagatatagttcacacaaataatatatgtgggttttcggtatcagcatgggatgctgtaaaaaaagcgaaggttaagcttgtacatacttctcgtgattattatttattccatccgaacagtacactgtttaaaagtggtaaagtaatgtcaccaagttctttatcagttctattttggagttggtttaaaaaaataaaaagtaacaaagtagataattatattggcattagtaaatatattactaatttacataaggattgtggcttttttaaaaaagccacttcggattttatatataactcagttactccgtatgtgccgaaaaaaaatgagagcgataaaataaggatcggttttattggtcgattgtcggttgaaaaagggtttgatgtatattgtaaagtagctagacaatataaagacgtaaatgaactgaagttttatgccgcagggaattttcaggctggaaatgatagcaatttacttaaaaaagatgccattgaaagctccgttgaggttttgggttatatggatttggcggaattcttggaactggttgacattgttattctaccgttgaagtggaatgaaccttttggccgtacagttgttgaatgtgcattggcaggaaagtttgttatcacaacttctatgggagcaatgattgaattggctcagataatgccaaatgtttccatcataaatgatatcgagcatgaattagatatctttcaaagatatacacttcatcaagatttagcagatgatgtcaaacagctatttgatccagataatattgccaaacaatatataaatcattataaaaaatagcctaaatgagagtttaatatgacattgcaatcatttgaatcaagattaataaacttctcattacttttatttttactatttgagtttttcgcaggaccattacgctggttgttccatttgttaggtgctgagcttttattttctatacctaaattgttaattttaattactatcctggtttctgttttaaatattatttacaaaagaaaaataacaaaaaacggattaatagcctcaatttccatcatatacatattattagtgagtatagtacatgttgaacttgcagcaggttttgttgctttttggggaattatacccatattccttgggtatcactcagctaggattatatttgaaagtgtacaaaataataaaactaataatataatttattttgttttttatgtttcatgtattggtgtattttgtaatattatattcaattatccttggtatgatgtttcatatgagattgcaggcatggatgtgtcatctgctcaaatgggaacgactggtggatatacaagatatgcgggtttttttaaaagttcgcttcaagcttcatcaaatattttaatattgttggtttatattgttgcatcaacaaaaaataaattctttattcttgtgtgttttattcttagtttgttggtgtcaataataacaatatcaaagacaacatttgcattgcatttgatattgctgttttacgtatttatgaaaattttacctgttaaacttttatggagaagtactcttatatttgcaattgttgtcacgtttttcaccattatgtccacgaactattcctttgaaatgaataatgatcctgcaactactatgttattaggatctttaaatgcacgtttaaccactacgtggccagatggtgtcgagtcaatattaaaatttggcagcttaacgttcggtgctggactaggtacaatcggggttggctcaaaactgggatcagggacttacaatcctggtgatagcatgtatctttatattattgctacaggaggatatatattaggtatatatttattgggatggttatattatcagtctaatattttaaataattctgctatttctcgattcctttctatgactcttattatactttgtttattcggaatttcgatgaccacgccagagtatcctcttatggggtttgcattgggtgtaatatttaacagcagagcaagtaatttacaatataaagaagctgagtgattatgaaaaaaatagttaattttgattctcgttggattggtgaacatggtatagggcgttttgcgaaggagattcaagatggtatacctgctttaaataggataaaagtagctattaaaccaacaagccctttcgatgttttttttgttactctatatcttatgtttaatagaggttattatttcacaccagggtataatgctccttttttccatcttaatcgtacagccataacaattcatgatcttaatcacatagacattgattttaactcaagtgttcttaaacggttgtattacaatttagtattaaaaagagcatgccggaaagcacgagttatattaaccgtttcagagttttcaaagaaacgaatatgtgaatgggctaaaattaatcaagataaagtaaaggtagtagggaatggtgtttcaaaagaatttaatttagaggttaacgggcttaaagaaaattatattttaagtgttggtaatcggaagaagcataaaaatgaaattgcagtgttgaatgctttctgttctgcaaatattccagaggctgtcatgctttattttactggcgagagaagtgaggaactattaaatcatgcaaaaaaattaaatatatcgaatcgaataaaattcatggggcgagttgataatgaaacattagctcaattatataaaggagcaaatatgcttcttttcccatctctgtatgaaggttttggtttacccgttatagaagcaatggcttgtggaactccggtaattacctctaatgtcacatctttacctgagattgctggtgatgctgcattattagttgatcctataaatcacggagatataagcttggcaattgaaaaaatttattatgacatagcgttgaggcaaaaattagttgaggaaggattaaaacaagttaagaaatttacttggcaaaaaaccataaataatgtcaagaacgaactagagacagcatttactattaaattataggtattacaatgctaaaaaatactatgaataagttattattttcagtatctataattctcagtttaaactctcctgttgcttcatcgttggaaattggaattggtactcattttcaatcatatagttcaactcccgaaacatatatttcattaatcaaagaattaggttttacatcttttcgcgatgattatccatggtcgaaaacagaaggcagtgaaggagtttattctgtttctaaatttttgaaaaaaacagattatgctttacttaatgctgacagggatggtttgaatccactcgttattcttgattatggtaataagttgtataataacggaggttatcctacaactgaacgtgacattcaagcatttgctaattatgcgggatgggtatcgcatcgttataaaggaaaagttaaatattatgagatatggaatgaatggacgatagctactggcatggttaaataccgaaatcaagttccttcggccaatgtctattataatttagtaaaaaaaactagtgaagtaataaaaaggaatgacccgaatgccatcattcttgcgggttctataaatcctctcgatttaagagcaagatatattgatgttaatgattggaaatggtttgagcaactagtaaacttaggaattttgaattatattgatggtgtatcattgcacacatattcatttatgaatggtaatccgctgttacgtacaccacagggtaatcttaatcgtatagatgcattccatacttactttactaaaaaaacagggaggagcatagatgtatatataactgaagcaggggtgacgaattatgatgggcctggaggaatggatttaatacagtctgcaaattttattaaagaatatactagcctagtcaaaaaacgatcttatattaaggggctttggtggtacgatcttattgatgatggaacagatattaaaaacaaagagcataattttggtttcttcaaaaataatttggaaccaaaagcttcagctgaatttatgatggcaaagtaataaggcacgattaaatgtattatataaaatgcattttttatatttcttaatgccgcatcactataacgagaacaaaaaataatgagatcaaaaaaaatgacttcattttgttgttttgcataaatttttgtaacaacactcattgttaaagaaaggttattgactcacaaagtttttttagtttatgaatgtaacatgtttatattgtaatagattgagttattgactttttagaataaaaattgaatattttcacaattaaggattaattcatgcataatttgaatattggaattgttgctgactggttggtcacgtacgcaggttcagaaaaagtaattaaagaatttttagaagtgtttcctgaaagtgaattgtattcaattgttgattttctatccgatgaggatagagttaatttcaagggaaagaaagcaactactagctttatacaaaaattccctttttctaaagttaaataccaaaagtatctaccattcatgccattagctatagagcaacttgatgtttcaaaacatgatattatattatctagcagtcatgctgttgcaaaaggtatcataacaggtcctgaccaattacatatatcttacatacattcgccaattagatatgcctgggatttacaacaccaatatattaaagaggcgggtttggataaaggtatgaaaggaatggttgctcgatggttattacataaaatacgtttatgggattgccgtacatcaaatggagtagatcatttcattgctaattctgagtttatatctagaagaatcagaaaagtatatggacgtgaatcaaaagtaatttatccaccggttgatgttaatagattcgggttatgtgaaaacaaggatgattattattttacagcatccagaatggttccttataaaagaatggatttgatagttgaggcgttctcacaaatgcctgataaaaagcttgtagtaataggtgatggttcagagatgtcaaagattaaggcaaaagcttcaagtaatattgaactattaggatatcaaccaaattcagtgatgcaagagtatatgcaaaaagcaaaagggttcgtatttgcagctgaagaagatttcggcattacgccagttgaagcgcaagcgtgtggaactcctgtaatagcttttggcaagggtggagcattggaaacagttcgtccatgcggggttaataaagctactggtgtatttttttataaacaagaaattaagtctcttgtaaatgctgttcaggaatttgaaaaaaatatcgatgtatttaatccacaacattgcagagaaaatgcaattcgcttttctgaggaaaggtttaagcaagaaataacccagttcgttgatcaaaaatggtccgcctttaaaaataacaaacaaattatatactagttactactatcattacttctgttattatttgtttttatacaaaaagagttgataagtaatattattttatattacttgggaaataatttactcggtgaggatatatgtctcgtctagctcgaaatttttggacaagtattttattagcgatatctgatttcactggttttacggttgctattgtattcgcaatcttttttgtgaaatcttttatgaatgatggcggacatattattgctaatagcaatattaatgattgggttattctccacacttgtttaggcatatgttgtgtggcgtggtattccattcgcctaaggcattatttttacaggaagacattctggttcgaattaaaagaaatattacgcaccttagttatttttgcaataattgaaattgcagtgttatcatttgcttattgggatttctcccgttatattttggcagttacatggattttcgtattattttttgtccctacatttcgtatgctcactaaaaagtgtttgaatttttttggattatggaagcgtgaaacaataataattggtgatggaaataacgcagtagaagcgtggaaagcaataaatagtgaatcaaacttaggttttaatgtaactagttttgtttcaagcacatcaaaagatcacctcaaaaatcacattaacgatattcctgtaatatctttaaatccaaaagaagtaacaaagcattttgataaaagaacacaattcattgtcgctttagaaactagtgaaagttcgatacgtaatgattggcttagagaatttcttattaatggttttagatatgtatcagttattcctacgttgcgtggtgtgccattggatagtactgatatgtcttttatttttagccatgaagttatgattttccgtgtacaacagaatttagcgaaattatcatcgcgtattcttaaacgtttgtttgatattataggttcactcaccataattcttgttagttcaccattattaatttacattgctttgaaagtaaaaaaagatcatgggcctgccatttatggtcacgagcgtataggtaatggcggaaggccttttaaatgtctaaaatttagatctatggttgtcaattctaaagaagtgcttgagcaacttttaaatactgatcctgctgcacgtaaagaatgggatgcgacttttaagttaaaagatgatcctcgaataacggatattggtaagtttttacgcaaaactagtttagatgagctaccccaactttttaatgtacttaaaggtgaaatgagtttggttggacctcgaccaattataaccgcagagcttgaacgttattctgacgaagtcgactattaccttcttagtaaaccaggtatgactggtctttggcaagttagtggaagaagcgatgttgactatgaaacccgtgtctatttggatgcatggtatgttaaaaactggtctatgtggaatgatatagctatcttatttaaaactataagtgttgttttaagaaaagatggagcctattaattgttttttgaatatttgatctaatttaattgtcgagggaataatgaaaatattactagttggaaatcatacttgcggtaatcgaggtgatggtgcaattctcagaggattagtggattctataaaacagatcaatccagatgtagaagttgatattttgagtcgttatgcaaggagttcagcctttttactaggaactgctattaagcaagatgtcctatattcatcaagaatgaataaaaatggtgggcttgttaaaaaagttatttggaagatcaagaatagtattcttcctgatatattagtttcgcatgcaaaaggcaaaggttttttaaagtattttcctttgccaaataatgttgttgaatttattaaagatcttgaaaaatatgatgctgtcattcaggtcggtggttctttctttgtcgatttatatggcactggacagtttgaacatatcttatgttcaaatatagcgggtaaaccaatatatttagttgggcacagtgttggtccttttgagaatcctaaattccagcatatcgcaaaatattgttttactaaagcagagaagataatactacgtgaagatgttagtttatctttgatggaaaaggataacttcaacttaaacaatgtaacattgggtgttgatacggcttttttggtggatacagaaaaagatgttaatgattatgctgtttctcattggaaaaagataattaaagaacagaaaacggtagctttaacagttaggaaactagctcctttcgataaacgtttaggtgtttctcaagatgactatgaggcttcaatcgcccgtattgttgattatttgaaccaattaggttatcaggttataatattttcaacatgcactggcattgaaagttatcatagtgatgaccgaatggtagccctttctgttaaaaataaagttcatgatagtcaatgttgccatgtcgtaatggatgaattcaatgattatcaattagggattttattatctaattgcgtctttacaataggtacaagattgcattctgctatcatttctatcaattttggaacacctgcaatagcaattaattatgagcataaatcgttgggtgttatgcgtggattaaaaatggatgtgctatcagctgatgttagcgatgtcattgatgggacattgattaataaaatagaagatttaattgctaatatggctgatattgaaaattccttaaaaaataacttacaagatgcaaaaataattgggcgcacaatgattgaaaacattctttctgagattgatagataatgaaaatactttttttttgtattcgattcccactcgcttctgaaacttttgttttaaatcaagttatttcctttattaaaaagggttatgatgtaaaagtattgtctttatatccgggagatactgaaaaagtacatggcgattttgaaaaatacaacataggtgctcttatagaaaatatttttgacgctgatgaaataccgggtaataaattatcccttatcttctcgagagcaaaaattgttttaaaatcaagttcatttagtattattaaagcattcaactttgagagatttaaatttttatcctactcattattattacctgcgatttttgcaaagttaaggaataataaaatttcaacggatgttataattgctcactttggtcattgtggtgtgcttgctaacgcaatcagggatatcgggttaattaatggtaagcttttgactgtattccatgggtatgatatttctacaattagccttcttaaaaaatataagattttatataaaaatttattttctcagggtgaatacttcttacctataagtaacttatggcgagataagttaatcagtatggggtgtgataaagataaaatatcggttataagaatgggaattaaaatagacgaatttaaatatgaatttcatgcacgtgatcaatcaactttaaacattatttccgtctgcagattaactgaaaaaaaagggctggtatatgctattgatgcttgtaatgcgcttaagaataaaggatgcaaatttaaatataaaataattggttatggagaattagagaatgtgctagccgaaaaaattaaagcactaggacttcaggattatgtctatcttttaggatttcagccacaatcagtagtaaaaacagctcttgctgagagcaatgtctttttgcttccatccgtaactgctagtaatggtgatatggaaggaatacctgttgcacttatggaagcaatggcgtcaggcttaccagttatttccacttatcatagtggtataccggagttaattgatgatcataagaatggttatctttgcccagagcgtaattctgaagctatagcaaaaattttatatgaaatatatgaaggaaaagataatctatcattaattgcttctgaagcgcgtgataagatttattctcagtttaacgaggaggttgagttcaacaaaatcgtcactttgctggagagcattaaatgagtggcattaaaaaacaagcaatttggttattaggatccaatacaatttctgccattcttcagattctacaaattagtttgctagctcaccatcttaaactaagtgagttaggagtactagctatagtcaatatggtattgatggttgcgatgatcttgcaggatatgggaatgagcagttatatagttcatatgcaagaaatgacaagaagagatcagagtactatttattggatcaacctgttacttagtttcctgacagggtgccttgttttcgttgcgtcttggcctatagcaactttttacaatatgcctgacttaacttttttagtaatgttggcaagctttaattttctttttctaggatctctatcgcaatatcaatcgcactacataaaagcaaaaaaagttatacttttggctaaaatagaaatcatttctaaaattatttcttttttattcgttttgttctcaattttaaagatggaactgagaactgaggctgtgatttatggtctgattattaattcttttgctcgtctttttttaatgtcattattaggtgataaatcttggcgacctacttttgagtttaattctgctatatgtaagccggtttttaaatatgggatctttcaattaggctcacagattctaaatcaatttcgcacacaattagatgttattgtaattggtaaaatgctaggtgcggattcacttgggttatattctttagctaaagatctcatcatgcaacctctaaagctgattagtcccgtaataaatagattggctttgcccagatttgcagaggttcaaaatcaatctgataaacttggtggtgcatatctgcgtggaacatctgtaattctgttgtttagcatgataacttttttctctatttatttgttggggccagttataatcaaaattttatatggttcaagtcgcatgggggtttttaatattctaccatatatgcttttgtttggtgttttaagacctatgggtgggttaacaggcgctgtggctcaagcaaatggcaagactaacattgagttcagatggaatgttatagcaacttcgattgttttgggtgttactactactgttttttttattcctcagttatggtatgtttcgttaagtctttcactttctcagttattgattagtttttttgtttttccttgttttataaaacctattgtagatgtgagttttaaatcatatttatataaatggtttccacaagctttatgctttatatgcttgatttatattgtcaagttttttgatctcgtgctttaccccttttggtgaatttcagaccaaaaattttaaaagcactaaacatctaaagatgtcctttgccatacgttgaccttacgttaatattatatgtactttaccctgcgagaatttcgcatagagcacacctgacaggagtatgtaatgtccaagcaacagatcggggttgtcggtatggctgtgatggggcgtaaccttgcgctgaacatcgaaagccgtggttataccgtctccgtttttaaccgctcccgtgaaaagaccgaagaagtgattgccgaaaatccaggcaagaagctggttccttactacacagtacaagagtttgttgaatccctcgaaacaccacgtcgtatcctgttgatggtgaaggctggagctggcaccgacagcgccatcgattccctgaagccttacctcgacaaaggcgacatcatcattgatggcggcaataccttcttccaggacaccatccgtcgtaaccgtgagctgtctgccgaaggttttaactttatcggtaccggtgtttccggtggtgaagagggggctctgaaagggccttccatcatgcctggtgggcagaaagaagcctatgagttagttgctccgattctgaagcagattgctgcggttgctgaagacggtgagccatgtgtcacctatatcggtgctgacggtgctggccattatgtgaagatggttcataacggcatcgagtatggtgacatgcagctgattgctgaagcttatgcgcttttgaaaggcggtctggcactttccaacgaagagctggcgcaaaccttcaccgaatggaacgaaggtgagttaagcagctacctgatcgacattaccaaagatatcttcaccaagaaggatgaagaaggtaagtacctcgttgatgtcattcttgatgaagcagcaaacaaaggtaccggtaagtggaccagccagagctcactggatctcggcgaacctctgtctctgatcaccgagtctgtatttgctcgttacatctcttcgcttaaagaccagcgtgtagctgcttcgaaagtgctgagtggtccgcaggctcaaccggccggcgataaagcggaatttatcgaaaaagttcgtcgcgcgttgtacctcggtaaaatcgtctcctatgctcagggcttctcccagctgcgagctgcttctgatgaatacaactgggatctgaactacggcgagatcgctaagattttccgcgctggctgcatcattcgtgcgcagttcctgcagaagatcactgatgcttatgcgcaaaacgctggcattgctaacctcctgctggcgccgtacttcaaacagatcgctgatgactatcagcaagcgctgcgtgatgtggtggcttatgccgtgcagaatggtattccggtaccgacgttctctgccgcgattgcctactacgatagttatcgttccgcagttctgccagctaacctgatccaggctcagcgtgattactttggtgcgcatacctataaacgtaccgataaagaaggtgtattccataccgagtggctggaataaatttattcaaacagtcaggccatttggcctgactgtttttaattttatatttaatgttgcaacctgaccttaagcattacctttctaaaaatatttctaatatctaattttaatctttttaagaatttgccatatttattatcttgtacgcctatattaatctacttctggcctcagtaaattactgggtgttaaataacagggttttaattaaaggaaattaatatgttacttcctgtgataatggctggcggtaccggcagtcgtctctggccgatgtctcgcgagctttacccgaaacagttcctccgcctgttcgggcagaactccatgctgcaggaaaccatcacccgactctcgggccttgaaatccatgaaccgatggtcatctgtaacgaagagcaccgcttcctggtggccgaacagttgcgccagctcaacaagctgtccagcaacattattcttgagccggtcgggcgcaacaccgccccggccatcgccctggcggccctccaggccacccgccacggcgacgacccgctgatgctggtcctcgccgccgaccatatcatcaataaccagccggtcttccacgacgccatccgcgtcgccgagcagtatgccgatgaaggccatctggtcaccttcggtatcgtgccgaatgccccggaaaccggctacggctacatccagcgcggcgtggccctcaccgacagcgcccatactccgtaccaggtggcccgtttcgtggagaaaccggaccgcgagcgcgccgaggcctacctcgcctccggggagtattactggaacagcggcatgtttatgttccgcgccaaaaaatacctctccgagctggccaaattccgcccggatatcctcgaagcctgccaggccgcggtcaatgccgccgataacggcagcgacttcatcagcatcccgcatgacattttctgtgagtgcccggacgagtccgtggactacgcggtgatggagaaaaccgccgacgcggtggtggtcggtctcgatgccgactggagcgacgtcggctcctggtccgccctgtgggaggtcagcccgaaagatgagcagggtaacgtcctcagcggcgacgcgtgggtgcacaacagcgaaaactgctacatcaacagcgacgagaagctggtggcggctatcggcgtggagaacctggtgattgtcagcaccaaggacgctgtgctggtgatgaaccgcgagcgttcccaggacgtgaagaaggcggtcgagttcctcaagcagaaccagcgcagcgagtacaagcgccaccgcgagatttaccgtccctggggccgctgcgacgtggtggtccagaccccgcgcttcaacgtcaaccgcattacggtgaaaccgggcggcgccttctcgatgcagatgcaccaccaccgcgccgagcactgggtcattctcgccggcaccggccaggtgacggtcaacggcaagcagttcctgctgaccgagaaccagtccacttttattccgattggcgccgagcacagcctggaaaacccgggccgcattccgctggaagtgctggagatccagtcggggtcgtacctcggcgaggacgacattattcgtattaaagaccagtatggtcgttgctaattttttcgggacaaaacgcagaatgacacagttaacatgctttaaggcttatgacatccgtggtgaactgggcgaggagctgaacgaggacatcgcctaccgtatcggccgcgcctacggcgaatttctgaaacccgggaagatagtggtggggggcgatgtgcgcctcaccagcgagtcgctgaagctggcgctggcccgcgggctgatggacgccggcaccgacgtgctggatatcggcctgagcggcacggaagagatttacttcgccactttccacctcggggtggacggcggcatcgaggtgacggcgagccataacccgatgaactacaacggcatgaagctggtgcgcgagaacgcgaagcccatcagcggcgacaccggcctgcgggatatccagcgcctggcggaggagaaccagtttccgccggtggacccggcgcgtcgcgggaccctgcgtcagatatcggtgctgaaggagtacgtcgaccacctgatgggctatgtggacctggcgaactttacccgtccgctgaagctggtggtgaactccggcaacggggcggcggggcacgtgattgatgaagtggagaaacgcttcgcggcggccggggcgccggtgacctttatcaaggtgcatcaccagccggacggccatttcccgaacggtatcccgaacccgctgctgccggagtgccgccaggacaccgccgacgcggtgcgtacgcatcaggcggacatggggatcgcctttgacggcgacttcgaccgctgtttcctgttcgatgacgaggcgtcgtttatcgaggggtactacattgtcggcctgctggcggaggcgttcctgcagaagcagccgggggcgaaaatcattcacgacccgcgtctgacgtggaacacggtggacatcgtgacccgcagcggcggccagccggtgatgtcgaagacggggcatgcgttcatcaaggagcggatgcgccaggaagacgccatctacggcggggagatgagcgcgcaccattacttccgcgacttcgcctactgcgacagcgggatgatcccgtggctgctggtggcggagctgctgtgcctgaagaacagttcgctgaaatcgctggtggcggaccgccaggcggcgttcccggcgtcgggggagatcaaccgcaagctgggaaatgcggcggaggcgatagcacgcatccgggcggagtatgagccggcggccgcacacatcgacacaacggacggtatcagtattgaataccctgagtggcgctttaacctgcgcacgtccaacacggagccggtggtgcgtctgagcgttgagtccagagcggatacggcgttaatgaatgcaaaaaccgaagagattttagccctcctcaagtaatgcattaaccataacggaagccatagggtcagattttaatcgtatttttgaccttatggcttattcttgacatcccacaggtcaaagcgtaaaaccgcccacagcattattaaaattcgtggctatccgccattacccagttaactgattaaagtgtaatcgaatgaaaattactatttccggtacaggttatgttggtttatcgaacggtatcctgattgcgcaaaaccacgaagtggtggccctggatatcgtacaggccaaagtggatatgcttaaccagaagatctctccgattgtggataaagagattcaggaatatctggcagaaaaaccgttaaatttccgtgccaccacggacaagcacgacgcctatcgtaatgccgactacgtgatcattgcgacgccgaccgattatgatcccaaaactaactacttcaacacctctacggtggaagcggttattcgcgatgtcacagagatcaacccgaacgcggtaatgatcattaaatcgaccatcccggtggggttcacccgcgacattaaagaacgtttagggattgataatgttattttctctcctgagttcctgcgtgaaggccgtgcgctgtacgacaacctgcacccgtcgcgtattgtcatcggtgagcgctctgcgcgtgccgaacgttttgctgatctgctgaaagaaggcgcgatcaagcaggatatcccaaccctgtttaccgactccaccgaagcggaagcgatcaaactgttcgctaacacctatctggcgctacgcgttgcctatttcaacgagcttgacagctatgctgaaagccaggggctgaacagcaagcagattatcgaaggggtatgcctggatccgcgtatcggcaaccattataacaacccgtcctttggctacggcggctactgtctgccgaaagataccaagcagctgctggcgaactacgaatcggtcccgaacaatatcatcgcggctatcgtcgatgccaaccgtacccgtaaagactttatcgcggattctattctcgctcgtaagccgaaagtggtgggtgtatatcgcctgatcatgaagagtggttcggacaacttccgtgcctcttctattcagggcattatgaagcgcatcaaggcgaaaggtattccggttattatctatgaaccggtgatgcaggaagatgagttcttcaactcccgcgtcgtgcgcgacctggatgccttcaaacaagaggcggatgtgatcatctctaaccgtatggcggaagagctggcggatgtcgcagataaggtttatacccgcgatctgtttggtaacgattaattctgcctgtctgacactggcggttccctgccgccagtgttcttctttatctccccgctatatctctcactacgcgtatttctcgcacattcagattaacctcaataaattgtgatggacattacgatcctgcgcaaaagccgttgcgggttgaaaacaggtccgataagttaaacttaccttgtgaagagctaccgtcactgtgatgtagatgccggagataagcgccgggaggtaaaacaaagcctgcaacgcaggcttttgttatttatgtcctatgaaaaaacgcggaatagggcgcgagtagcgttattttttttcttgccttaaggccatgccaaaacgcagaatgaatagtcattctgtcatatcatttttttatctcttaatattatcttaatctaattgtaatacggaacgggccttaccacttgcgtttattaaacgtcagtttcgttttctttctgtcttttaaataagaaattaagaaataaacggaaacagcaagtagtatggcagcgaccactaagaaaaataggttttccataatatctaccacagggcgtatgttgattgaattattagcttgataagcaatacatcagttttgtgctgttgcatggcttgctctaacatatcctggatttaggaaaattcctacagatagtaatgttttttatcaatcagcatataatgctgtttccgctaaccaaattggtctggataccagaaaagtttcagtgcctggtgcgcggatatttgcttttctgaaaaaggctggatgaaactggtctcaggcgggcgagtaaaaaggcaaaaatggcgtctatagcacaaaatattatataaaaaataatgaatgtgcattccgtcgacatatagtcaggataacggaggttacattgaaggggttgccgcaatcagacgattgcggcagggcagggggattagatctgatagtaatccttgtaccactccacgaagttcttcacgccgtccttcactgacgtttgcggcttaaagcccaccaggtcatacagcggttgggtgtctgcgctggtgtccagcacatctcccggctggatcggcatcatattcttctgcgcttccattcccagcgcctcttccagggcagtgatgtagtccatcagttccactggtgagctgttgccaatgttatataccctgtatggcgcggagctggtggccggggaaccgctctcaacggtccagtcggcattggcctgcgggatcacatcctgcacccgaaccaccgcctcgacgatgtcgtcgatataggtgaagtcgcgcttcattttgccgtagttgtaaacgtcgatactttttccttccagcatcgctttcgtgaacttgaacagcgccatatccgggcgaccccacggaccataaaccgtaaagaagcgcagcccggtggtcgggatgccgtacagatgggaataggtatgcgccatcagctcattggctttcttggtggcggcatacagggagaccggatggtcgacggaatcttcggtggagaacggcattttacggttaaggccgtaaaccgagctggaggaggcgtacaccaggtgtttcaccttggtatgacggcagccttccagaatgttcagataccccatcaggttagcgtctgcgtaggcatacgggttttccagcgagtagcgcacaccggcctgggcggccaggtggatcacgcgatcaaattgctctgtggcgaacagctttgccataccttcacggtcggccagatccagctgctggaaatggaatgccggagatgccaggcgatccagacgggcctgcttcaggctgacgtcataatagtcgttcatgttgtcgattccgacaacatcatgcccttcattcagcaggcgctgcgcgatatggaagccgataaaacctgcggcaccagtgaccaaaaacttcatatttttcctccggggtgtggatatcccgttctacataagtgccgattttacactggcttgcggttgggatcacttgctttgccgcgtcttacccgccaggtgagaggtgaaggacgttttttctggcaaaactgcggtggcaaaggctgataaataacaacatttctcatttgactgttagcctccgaataataaccttgtgaccggtcggtggtttagcgattcgtggcgataccctaaaggcagccaataccctccgggacggcataattttgcttaaagttatatttttcgtcagcggaacatttagtaaatgggcaaaaatcgcgccatgctttcctccgttttgtcttttatatcattgacttattgttgttttgtttgtttaatgaatgtttaagatgtgtattatttgagtaatccattaatcagtaggcttttttatttttattcccggcgtccagcgctataatctgcggacgattttctttgtggaatgtgcattgtagagcatgagtcgtttatcccacctgtcggaacatagcgccgccgccgtgtgcaaagggccatcaagcctgaacgcgcgctgtctccctggcggcgaagacgatgtctcttcttctctttccccgcatcgtgaacgctcccttttgctgctggctcacatcggcgggtcgcccgtttctctttcatcagtggcgaaaagcgcagacgttataccctgcgtaaatgagaaagtcctgatggttaattcggcggcaaatgaggaaagtgtggtgcgtttggcggccaggtgaggaacagatgcatattaaaagcagagatatgtctcaaggcatatctctgcttttaggttttcaggccccccgttctgtcagactggcttttcaggccgctgagtgaacgatctgccgatagcctgaagcgaaagcgggtggcgtttagcctggagcacgggagcagtacgcattttggttgcgacagccaatggcggtagcgtgcctgaaaaaggccgttccacccagacggtcgattgattgatagtaaaataaagcaattatttatttaaggatttcattatgttacttcctgtaattatggctggtggtaccggcagtcgtctctggccgatgtctcgcgagctttacccgaaacagttcctccgcctgttcgggcagaactccatgctgcaggaaaccatcacccgactctcgggccttgaaatccatgaaccgatggtcatctgtaacgaagagcaccgcttcctggtggccgaacagctgcgccagctcaacaagctgtcgaacaacattattcttgagccggtcgggcgcaacaccgccccggccatcgccctggcggccctccaggccacccgccacggcgacgacccgctgatgctggtcctcgccgccgaccatatcatcaataaccagccggtcttccacgacgccatccgcgtcgccgagcagtatgccgatgaaggccatctggtcaccttcggtatcgtgccgaatgccccggaaaccggctacggctacatccagcgcggcgtggccctcaccgacagcgcccatactccgtaccaggtggcccgtttcgtggagaaaccggaccgcgagcgcgccgaggcctacctcgcctccggggagtattactggaacagcggcatgtttatgttccgcgccaaaaaatacctctccgagctggccaaattccgcccggatatcctcgaagcctgccaggccgcggtcaatgccgccgataacggcagcgacttcatcagcatcccgcatgacattttctgtgagtgcccggacgagtccgtggactacgcggtgatggagaaaaccgccgacgcggtggtggtcggtctcgatgccgactggagcgacgtcggctcctggtccgccctgtgggaggtcagcccgaaagatgagcagggtaacgtcctcagcggcgacgcgtgggtgcacaacagcgaaaactgctacatcaacagcgacgagaagctggtggcggctatcggcgtggagaacctggtgattgtcagcaccaaggacgctgtgctggtgatgaaccgcgagcgttcccaggacgtgaagaaggcggtcgagttcctcaagcagaaccagcgcagcgagtacaagcgccaccgcgagatttaccgtccctggggccgctgcgacgtggtggtccagaccccgcgcttcaacgtcaaccgcattacggtgaaaccgggcggcgccttctcgatgcagatgcaccaccaccgcgccgagcactgggtcattctcgccggcaccggccaggtgacggtcaacggcaagcagttcctgctgaccgagaaccagtccacttttattccgattggcgccgagcacagcctggaaaacccgggccgcattccgctggaagtgctggagatccagtcggggtcgtacctcggcgaggacgacattattcgtattaaagaccagtatggtcgttgctaattttttcgggacaaaacgcagaatgacacagttaacatgctttaaggcttatgacatccgtggtgaactgggcgaggagctgaacgaggacatcgcctaccgtatcggccgcgcctacggcgaatttctgaaacccgggaagatagtggtggggggcgatgtgcgcctcaccagcgagtcgctgaagctggcgctggcccgcgggctgatggacgccggcaccgacgtgctggatatcggcctgagcggcacggaagagatttacttcgccactttccacctcggggtggacggcggcatcgaggtgacggcgagccataacccgatgaactacaacggcatgaagctggtgcgcgagaacgcgaagcccatcagcggcgacaccggcctgcgggatatccagcgcctggcggaggagaaccagtttccgccggtggacccggcgcgtcgcgggaccctgcgtcagatatcggtgctgaaggagtacgtcgaccacctgatgggctatgtggacctggcgaactttacccgtccgctgaagctggtggtgaactccggcaacggggcggcggggcacgtgattgatgaagtggagaaacgcttcgcggcggccggggcgccggtgacctttatcaaggtgcatcaccagccggacggccatttcccgaacggtatcccgaacccgctgctgccggagtgccgccaggacaccgccgacgcggtgcgtacgcatcaggcggacatggggatcgcctttgacggcgacttcgaccgctgtttcctgttcgatgacgaggcgtcgtttatcgaggggtactacattgtcggcctgctggcggaggcgttcctgcagaagcagccgggggcgaaaatcattcacgacccgcgtctgacgtggaacacggtggacatcgtgacccgcagcggcggccagccggtgatgtcgaagacggggcatgcgttcatcaaggagcggatgcgccaggaagacgccatctacggcggggagatgagcgcgcaccattacttccgcgacttcgcctactgcgacagcgggatgatcccgtggctgctggtggcggagctgctgtgcctgaagaacag

SEQ ID NO: 54 - DNA, 489171 bp, Unknown
  source: /note="Description of Unknown: MKP2_coc_1 Mutant Bacteria sequence"
acaacggcatctccatcgacggccacgttgaaggctggttcaccgacgacaccgccaaacgctttgaagcctacggctggcacgtggtgcgcggcgtggacggtcacgacgctgacgccatcaaacgtgcggtagaagaagcgcgggcggtcaccgacaaaccgtccctgctgatgtgcaaaaccatcatcggtttcggttcgccgaacaaagccggtacccacgactcccacggcgcgccgctgggcgacgccgaaatcgccctgacccgcgaagcgctgggctggaaacacgcgccgtttgacatcccgtctgacatctatgcccagtgggatgccaaagaagccggccaggcgaaagaagcggcgtggaatgagaagttcgctgcctacgccaaagccttcccgcaggaagcagccgaattcacccgccgtatgaaaggcgagatgccgtctgacttcgacgcgaaagctaacgagttcatcgcgaagctgcaggccaacccggcgaaaatcgccagccgtaaagcctcgcagaacgccatcgaagccttcggcccgctgctgccggaattcctcggcggctccgcagatctcgcgccgtccaacctgaccctgtggtctggctctaagccgatcaacgaagacgctgccgggaactacatccactacggcgtgcgcgagttcggtatgaccgctatcgccaacggtatcgcgctgcacggcggcttcctgccgtacacctccaccttcctgatgttcgtggaatacgcgcgtaacgcggtacgtatggccgcgctgatgaaacagcgtcaggtgatggtctacacccacgactccatcggtctgggcgaagacggcccgactcaccagccggtagagcaggtggcttccctgcgcgtgaccccgaacatgtccacctggcgtccgtgtgaccaggttgaatccgcgattgcgtggaaatatggcgtggagcgtcaggacggcccaaccgcgctgatcctctcccgtcagaacctggcgcagcaggagcgtaccgcagagcagctggcgaacgtggcccgcggcggttatgtgctgaaagattgcgccggccagccggagctgatcttcatcgccaccggttcagaagtggagctggcggttgccgcatgggacaaactgactgccgaaggcgtgaaggcgcgcgtggtttccatgccgtccaccgacgcgttcgacaagcaggatgcggcttatcgcgaatccgtactgccgaaagccgtgaccgcgcgcgttgccgtggaagcgggtatcgctgactactggttcaaatacgttggcctgaacggcgctatcgttggcatgaccaccttcggtgagtctgcgccggctgagcagctgttcgaggagttcggcttcaccgttgataacgtggtcgctaaagcgaaagcgctgctgtaatcgctggtacggtgcgggctgatgccctcaccccaaccctctcccacaggagagggtgcaaacaccaaaacggtaacccctgggttaccgttttgcttttatctcgccacccggcttttttgtatctgctattcctgaaccatgtaatacggttgtaaattattccagcaaaaatgtgatgtgagtcatatagctggtttattgcgctggacaaacattccttttattcctcatttcgcttattctagctgaagcgtttcagtcgtttaaatgttcgacaattaatcaatcagtcgcagtttgcagctggtaaggttcccctcagagcgttgctggattactctgtcagccacctcataacagggacagccttgcaggagatctatgaccattcgcatcgcgattaatggcttcggtcgcattggacgcaacgtggttcgtgctctatatgaatccgggcgtcgtgcggaaatcaccgtggtggcaatcaatgagctggcggatgccgcgggcatcgcgcatttattgaaatatgacaccagccatggccgtttcgcctgggatgtccgtcaggagcgcgagcagctgtttgttggcgacgatgccatccgtctgctgcatgagccgaccattgcggcgctgccctggcgcgaactggcggtggacgtcgtgcttgactgtaccggcgtatacgggagccgtgaacacggtgaagcccatcttcaggcgggggcgaaaaaagtgctcttttcccaccccggcggcaacgacctcgacgcgacggtggtgtacggcgtaaatcaggatgaacttcgcgccgggcatcgcattgtctccaacgcctcctgcaccaccaactgcattattccgatcattaaactgctcgatgacgcctatggcattgagtccggcaccgtcaccaccattcactcggcgatgcatgaccagcaggtgattgacgcttatcatccggatctgcggcgtacccgcgcggccagccagtcgatcattccggtggataccaaactggcggcagggatcacccgtatttttccgcaatttaacgaccgttttgaagcgattgccgtgcgggtgccgacgattaacgtgacggcaattgacctgagcgtgacggtgaaaaaaccggtaaaagcatgtgaagtcaaccagttgctgcaaaaagcagcacaaggtgcatttcatggtatagttgactatacggaattaccgttggtctcgacagattttaaccacgatccgcacagcgccatcgtcgatggtacgcaaacccgggtcagtggcgcgcatctgatcaaaacgctggtctggtgcgataacgaatggggctttgctaaccgaatgctcgacacgacgttagcgatggcggctattggtttcaggttcgacgcgtaaacgtcgacaaaactttatgaatcaacgagaggattcaccatgtctgtaattaagatgaccgatctggatctggctggtaaacgcgtttttatccgtgcggatctgaacgtaccagttaaagacgggaaagtaaccagcgacgcacgtatccgtgcatctctgccgaccattgaactggcgctgaagcagggcgcgaaagtcatggttacttctcacctgggtcgtccgaccgaaggcgagtacaacgaagaattctctctgctgccggttgttaattacctgaaagacaaactgtccaacccggtacgcctggttaaagactacctggacggcgtggaagtggctgccggtgaactggtggtgctggaaaacgttcgcttcaacaaaggcgagaaaaaagacgacgaagaactgtctaagaaatacgctgcgctgtgcgacgtgttcgtgatggacgctttcggtactgcgcaccgcgcgcaggcttccacccacggcatcggcaaatttgctgacgtggcgtgcgcaggcccgctgctggccgctgaactggacgcgctgggtaaagcgctgaaagagccagctcgtccgatggtcgctatcgttggtggttctaaagtgtccaccaaactgaccgttctggattccctgtctaaaatcgctgaccagctgatcgtgggcggcggtatcgctaacaccttcgttgccgctcagggccacaacgtcggtaaatccctgtacgaagcagatctggttgatgaagccaagcgcctgctgggcacctgcgatatcccggttccgaccgacgttcgcgtagcgaccgagttctccgaaaccgcaacggcaaccctgaaatctgttaacgacatcaaagatgacgagcagattctggaccttggcgacgtttccgcacagaaactggctgaaatcctgaagaacgccaaaaccatcctgtggaacggcccggttggcgtattcgaattccctaacttccgtaaagggactgaaatcgtggctaacgctatcgcggacagcgaaggtttctccatcgccggcggcggtgacaccctggcagcgatcgacctgttcggcatcgctgacaaaatttcctacatctccactggcggcggcgcattccttgaattcgtcgaaggcaaagtcctgccggcagtagcgatgctcgaagagcgcgctaagcagtaattcagttcaggcggggaaacccgcctgtttttcagcgcgcttaagggctcgcgaaccttcttcaacggtcgaagatacagatacaggactaagtaacatgtctaaaatttttgatttcgtaaaaccgggcgtcatcactggcgacgacgttcagaaagtgttccaggtagcgaaagaaaacaactttgcactgccggcggtaaactgcgtaggtactgattccatcaacgccgttctggaagctgcagcgaaagttcgctctccggttatcgttcagttctctaacggcggcgcagcgttcatcgcaggtaaaggcgtgaaaactgacgttcctcagggtgctgctatcctcggcgctatctctggcgcccaccacgtgcaccagatggctgaacactacggcgtgccggttatcctgcacactgaccactgcgcgaagaaactgctgccgtggatcgacggcctgctggacgccggtgaaaaacacttcgccgctactggcaaaccgctgttctcttcccacatgatcgacctgtctgaagagtccctgcacgaaaacatcgagatctgctctaagtacctggcgcgcatggccaaaatgggcatgaccctggaaatcgaactgggctgcaccggcggtgaagaagacggcgtggataacagccacatggacgcttccgccctgtacacccagccggaagacgtggattacgcctacaccgagctgagcaaaatcagcccgcgtttcaccatcgccgcttccttcggtaacgtacacggcgtgtacaaaccaggtaacgtagttctgaccccgaccatcctgcgcgactctcaggaatatgtttccaagaaacacaacctgccgcacaacagcctgaacttcgtgttccacggcggttccggttcttccgctcaggaaatcaaagactccgtcagctacggcgtggtgaaaatgaacattgataccgacacccaatgggcaacctgggacggtatcctgcagtattacaaagcgaacgaagcttacctgcagggccagctgggcaacccgaaaggcgaagaccagccgaacaagaaatactacgacccgcgcgtatggctgcgtgctgcccagacttccatggtgactcgtctggagcaggcatttaaagagctgaacgcgatcgacgttctgtaagaaaaatctgtttcttacccggaagcccgcagcaatgcgggcttttttattatcttaacaacaggatagcgtggcagaaaactgtgatccatttggcaaaacgtgcacttattgtttaccctataacctgactgccctgtcgcaggctgagttatttacttccccccaggggattcataaggaatgttaaatggaagatttgaacgttgtcgatagcatcaaccacgccgggacgtggctggcacgcaaccaggagctgctgctgagctatgccgtcaacatcgtcgcggctatcgctatcctgatcgtcgggatgatcgtggcgcgcgtcgtctctaataccgtcaaccgcctgatgctggcgcgtaaaattgacgctaccgtggccgattttctctctgcgctggtgcgctatgcggttatcgcttttacgctgattgccgccctggggcgggtaggcgtgcagaccgcctcggtgattgcggtgctgggtgctgccggtttggcggtgggtttagcgctgcagggatcgctgtcgaaccttgccgcaggcgtactgctggtgatgttccgcccgttccgcgctggcgagtatgtcgaccttggcggcgtggcaggtacggtgttgaacgtgcagattttctccaccaccctgcgtaccgcggacggtaaagtagtggtggtcccgaacgggaaaatcatcgccggcaatatcattaacttctcccgggagcctgcgcgtcgcaatgagtttattatcggcgtcgcttacgatgctgatatcgacaaggtaaagcagctgctgacctcgattatcgaatctgacgatcgaattctgcgcgatcgggaaatgaccgttcgtctgaacgaactcggcgcctcgtcggtgaacttcgtggtgcgcgtgtggagcaaaagcagcgatctgcaaaacgtctactgggatatcctcgagcgtatcaagcgtgaatttgacgccaacggcatcagcttcccttacccgcagatggatgttcatgtggtgcgcctgccggaaaaagcagagtaaagcgcctctcaataactcaggccggccatgccggcctttttcaatagctcatcattagtagttctaattaatgattaattctttcaatttccgctaataattcattcgcgctatagtcagcgccactctcgaactcagcggataaatccttatgtttacttattactttcaggggcttgccctgggagcggctatgatattgccgcttggcccacaaaatgcctttgtgatgaatcaggggatccgtcgtcagtatcatctgatgattgccctgctatgcgcggtcagcgacttgctgttaatctgcgctggcattttcggcggtagcgcactgctgatgcaatccccgtggctgctggcgctagtgacctggggcggcgtggcctttttgctgtggtatggcttcggcgcattgaaaacggcgttcagtcagagtcttgaactcgccaatgcagaggtaatgcagcaggggcgctggaaaatcattatcaccatgctggcggtgacctggcttaacccgcacgtttatctggacacctttgtggtgttaggcagcctgggaggtcagctggcggtggagccgaagcgctggtttgcgctagggaccattagcgcctctttcctgtggttctttggcctggcgctgttagccgcctggctggcgccgcgactgcgtaccgccagagctcagcggatcatcaatattgtggtcggcgccgtcatgtggtttattgcgtttcagctggcaagagaaggcgtcagccatatccaggcgttgcttaactaagcgttgtccgatggactttcctgctgtacgcgctaagcttgctggcatgcgtcccgtaagggcgatttaagtaacatggagaaacgacagtgaagttaaaagtcttagccctggcggcaacactcggattgaccacgatggcggcacaggccagcgaattgccggatggcccgcacattgtgacttcaggcacagcaagcgttgccgcggttccggacatcgccaccctggcgatcgaagtgaacgtgtcggcaaaagacgccgcgtcggcaaaaaaacaggctgacgatcgcgttgcgcaatatctctctttcctcgaaaagagcggtattgctaaaaaggacatcaactcggcgaatctgcgtacccagcctgattacgactatcagaacgggaaaagcattctgaaaggctatcgcgcggtgcgcacagtggaagtgaccttgcgccagctggataaactcaacggtctgctggatggcgccctgaaagcgggtctcaacgaaattcgctccgtctcgctgggcgttgcgcaaccggacgcctacaaagataaagcgcgtaaagcggcgatcgacgacgccgtgcatcaggcgcaggagctggccgcaggcttccacagcaagctgggtccggtgtacagcgtgcgctaccatgtctccaactatcagccgagcccgatggttcgcatgatgaaggccgctgacgctgcgccggtttctgcccaggaaacctacgagcaggcgactatccagtttgacgaccaggtcgatgtagtctttgagctgcagccggcgcaagccgctgctccagccaccccggcgaaaccggcggaaacgccgaaaccggcccagtaagcgatagaaacaaaaaagccacttcagcgaagtggcttttttatgcccgcggtttaatcctgacgcagcaccttgtgtccgtagtcaatgagcgcatcggtcacccggcgcatcatgcggctttccggggcgaagcggtgccagtagagcatgcggcgctggaacaggcccggggtgagatcgataagttcgccgctgttgagctctttttcgatctgcagatgcgggatcatacagcaggtggtgccctggcgcgccagctgcacgaaagcttccgacgagttgacgatgtggcaggggacgctgcccggcggcaggtcgaagttttgctgcaggaacgcctgatgcatatcgtccagatggtcgaaggcgacgaccggcgccttaagcagcgccgaacgcgtcacgccattcgggaaatagcgttgcgcaaactcttttgatgcgacaaacaggtaatcgagcgcccccagctgatccaccaggcagcttggcagcgcctgcggctggatactcactgcgcccactacttcgccacggcgcaggcgctcctgggtgcgggtttcatcttccacctgcaggttgagacgaataggggagtctgacagaacgttggccagcgccggcagcagccaggtcgccagactgtcggcgttcaccgccagcgacagcagcagcggcgtcgagccggtttgttcatcgcccagccactcttcctccagcagttcaacctggcgcaacagagccagcagtttctgtccttgctcggtggggcgcggcggcacggtacgcaccagcagcggctggccgaacatattttccagctgcttaatacgctgtgagacggcggactgggtaatacatagcttctgcgcggcgcgctcaaatcctcgttccctaatcaccgcatccagcgcttgtagtgtcctgtagtccggtcgtttcattattctggcgtgcccccataactaatcgttatctcgcactatgacataaatttttatttgatacagacgaaattggtctgttcagttgtgtgatctgcatcgcagggacatttccactatcgatgttctataatgcgccacaggcattcacatctcggaccagaattatgacgcaggatgaactgaaaaaagcggtaggttgggcagcactgcaatatgtacagccagggactattgtcggcgtaggcaccggctcgacggcggcccattttattgacgcgctgggcaccatgaaggggcagatcgaaggggcggtttccagctccgacgcctccaccgagaagctgaaaagcctcgggatcaccgtcttcgatcttaacagcgtcgatcgcctggggatctatgttgacggcgcggatgagatcaacggccatatgcagatgatcaaaggcggcggcgcggcgctgacccgtgaaaagatcatcgcctcggtcgcggataagtttatctgcatcgccgacgcctccaagcaggtcgatattctgggcaagttcccgctgccggtggaagtcattccgatggcgcgcagcgccgtggcgcgtcagctggtcaagctgggcggccgtccagagtaccgtcagggcgtggtgaccgataacggcaacgtgatccttgacgtgcacggcctggaaattctcgatgcgatcgcgctggaaaacgcgatcaacggtattcctggcgtcgtcaccgtggggctgttcgccaaccgtggcgccgacgtggcgctgattggtactgccgacggcgtgaagaccatcgtaaaatagtctgtccgcagggagccgaccggctccctcgcaaatattttttcaccaggtgcaatttggtgacttctgtcacatttatgcaaccattctgatttacacgctaccatttcttctctttctggtgttttgtcctgcgatttccctctggatgacatttcttcaggacggcgacgcaaacgttcatattgccgcgatagttttttttgatatgttgctgagacgaactttcgttcagcacgacatcagttaagacaaaacaggacggggaaatggctaaggtatcactggaaaaagacaagattaaatttctgctggttgaaggtgtgcatcaaaaggcaatcgatagccttcgcgcagcgggttacaccaacattgaatttcataaaggcgcgctggattcagaacagctgaaagcgtcgatccgtgatgcccatttcatcggcctgcgttcccgtacccatctgactgaagagattttcgccgcagcggaaaaactggttgccgtcggttgcttctgcatcgggaccaaccaggtcgatctgaacgccgctgcgaagcgcggtattccggtgtttaacgcgccgttctctaacacccgctcggtggccgagttggtgatcggcgaactgctgctgatgctgcgcggcgtgccggaagccaacgccaaagcgcaccgcggggtgtggaacaagcaggcggtcggcagcttcgaagcgcgtggtaaaaagctgggcatcatcggttacggccacatcggtacccagcttggcattctggcggaatcgctgggaatgcacgtcttcttctatgatattgaaaacaaactgccgctcggcaacgccactcaggtacagcatctctccgacctgctgaacatgagcgatgtggtcagcctgcacgtgccggaaaacgcctctaccaaaaatatgatgggcgcggaagaactggcgctgatgaagccgggcgcgctgctgatcaacgcctcccgcggtaccgtggtggacattccggcgctatgcgatgcgctggccagtaagcatctggccggggcggcgatcgacgtcttcccgactgaacctgcgaccaacagcgaccccttcacttccccgctgtgcgagtttgataacgtgatcctcacaccgcatatcggtggctccactcaggaagcgcaggagaacatcggtctggaagtagctggcaagctggcgaaatactctgacaacgggtcaaccctgtcggcagttaacttcccggaagtttctctaccgctgcacggcggccgccgtctgctgcatatccatgagaaccggccgggcgtcctgaccgcaatcaaccaaatcttcgccgcgcagagcatcaacattgccgcccagtatctgcaaacgtcgccgcagatgggctacgtggtgattgatattgaagcggaagaagatgttgcccagcaggcgctgcaggcaatgaaagcgatcccggggactatccgcgcccgtctgctgttctaatcatttttgcctctcgggcaggtcgcgtacctgcccgtttttttgttaatactttccaggctgaatttctcgtccccgcgtacctaccaacaccaggtttttcccggggtgatgaccgccggcagcgggatatcccactcttcgctcggcaggctatccacctgctggcagtcgtgcgcgtagcccaccggctgcaggcgatactgctgccagttttgcagcgtccggtcgtaaaaaccgccgcccattcccagccgttggccactgacatcgaaggccaccagcggggtcaccagcacatcgagttcagccagcggcagcacatcccgcacatcgagcttcggttcgcggatcttcaggcgattcacgatcagttggctctgcggatggtagtgtaaaaacagcagattgccggggctaaagggatgcagcaccgggagatatacccgcttgccggcgcgccagagctggtcgatcagcggctgggtgtccagctcgccgtcaaaggagagaaacagcgccacgttgtgggcgagaactaccggcggccaggccatcatccgctcggcggcctgttgggcaaacaggcgctgttgctccgggctgagtgcgcgtcgacgatcgcggatctgctggcgaatatgctgacgggagagcagggtatcgggctgtatagtcatgcaggtctcgttacgagctggcgaaacaataggagcaagtgtaatacagggcggcttcagccgaaaacacgtatgggggatgatgcgaagtaaagaagggaatctccgagatgccgccgcaggctgtaacccttgaacccttggttcaaggtgaatgtgtcgtcacggttttaaggcttctcggacgaaccgagcatgctcaccaaccgtggagcgccacattcttgtggtatgaaatatcggctcaggggactggcccacttgcaaacatctcagagaaattttgttcttgcgattactctaacacagttaactgcaaagtgttattcaaacttcgaccctggcttttcgcttatgcgaccttgctcaagcaatgcttgttcgatggtctgctgaagcatgcgaatgcgctgctccatgctggaagcgtagtcgcgggtcttcgctttttcctgagtcaactcatagctgatgttcaacgccgcgatgaagaccagctgctcagtatttgtgactctagtgcgttcttttaaatcttgcaaccgctgattaaggtcttcagctgcctgattcagggcatccctttgttcaggcgggcaattcactcgcagtgaacggccgaaaatttggagatctacgggttgtgcagacatgccaccttcctgctgattgactgcgctgccttcacaccctggcccgggtctgcgaaggggcgacactatagctaccctggtgcgaagatacaagccctattctggttcaccagggtccaaagtggtagcataccatgaatattcctcccaacgatgacgaatgcgcatgtctatacagaacgaaatgcctggttacaacgatgtagaccagttactgaaccaacaaggggtaggtctcaccccggccgaaatgcacggtttgatcagcggattgctgtgcggcggcaacacggacagcagctggcagccgctggtgcacgacctgaccaacgaaggtctcgcctttggccatgaactggctcaggcgctgcgtaacatgcattccgccatcagcgattcactggatgacgacggtttcctctttcaactgtatctgccggaaggcgatgcggtgagcgtctttgaccgtgccgacgccctcgccggttgggtcaaccacttcctgcttggtcttggcgttagccagccgaagctggataaagtgaaggatgaaaccggggaagcgattgacgatctgcgtaatattgcccagctgggctacgatgaagacgaagatcaggaagagctggagatgtctctggaggagattatcgagtatgtccgcgttgccgcactgctgtgccacgacacctttgcccgtcagcagccaaccgcaccggaagtccgcaaaccgacattacactaactaaaattcgttcagggggcgtcatgactcagcaggaatttctatcgcgtcgccagacgctgttggcgcagatgcagccaggcagcgcggcgctgattttcgccgcaccggaagcggtgcgcagtgcagattcggaatatccctaccggcagaacagcgatttctggtacttcaccggctttaacgaaccggaagcgctgctggtgttgattaaaagcgatgaaacccacaaccatagcgtgctgttcaaccgggttcgcgatctgaccgctgagatctggtttggacgccgtctgggccaggaggccgcgccggcgaagcttggcgtcgaccgggcgctggcgttcagcgaaatcaaccagcagctgtatcagctgctcaacggtctggacgcgatctacttcgcccagggtgaatatgcctatgccgatgagattgtgttcaacgccctcgaaaaactgcgcaaaggcgcgcgccagaatctgcaggcgccgaactcggttatcgactggcggcccattgtgcatgagatgcgcctgtttaaatccgcggaagagcttgccgtgatgcgccgcgccggggagatcaccgcgctggcccatacccgggcgatggaaaaatgccgccctggcatgttcgaatatcagctggaaggtgaaattctccatgaattcaaccgccacggggcacgtttcccctcctataacaccatcgttggcggcggcgaaaacggctgtattctgcactacaccgaaaacgaatctgaactgcgcgacggcgatttagtcctgattgacgccggctgcgagtatcgcggctatgccggggacattacccgcaccttcccggtaaacggtaaatttacccagccgcagcgcgagatctacgacattgtgctcgaatcgctggagaccgcgctgaaactctatcggccgggcacctcgatctgtcaggtcaaccaggaagtggtgcgcattatgattaccggcctggtgcggctggggatcctgaaaggcgagattgacgagcttatcgccaacaacgcccaccgcccgtactttatgcatggcctgagccactggctgggtctggatgtgcacgatgtcggtaattacgacaccgaccgttcgcgcgtcctggagccgggaatggtgctgaccgtcgagccgggactgtatatcgccaccgatgccgacgtgccggcgcagtatcgcggcatcggcatccgtattgaagatgacatcgtgattaccgaagacggtaacgaaaatctcaccgccggcgtggtgaagaaggcggatgagatcgaggcgctgatggcggcggcgcgccagtcatgagcgtgctgatcgtcgggggcgggatgaccggggcgacgctcgcgctggccatctcccgtttgactggcggcgcgctgccggtccacctcattgaagcgcaggatccgcattcgtcacgccaccctggctttgacgaccgggcgatcgccctggctgcgggcacctgccagcagctggcgcgtatcggtatctggcaacgcctcgccgaacgcgcgacgcccatccagcgagtacacgtcagcgaccgcggtcatgccgggtttgtgaatctggcggcggcggattatggcctgtcggcgctgggccaggtggttgaactccacgatgtcggccagcggctgtttggtctgctgcgcgaggcgccaggcgtcacgctgcactgtccggcgaaagtggaagcggtcagtcgcagccaggagagcgtcagccttacgcttgagggcggcgaaatcattaacggtaagctgctggtggcggcggacggttcccgttcggcactgggcgcccgctgcggcatcagctggcagcagcagccgtatgagcagatagcgatcattgctaacgtcagcaccgcgttgccccacgaaggtcgcgccttcgagcgctttaccgagcatggcccgctggcgatgctgccgatgtcgcaagggcgctgctcgctggtgtggtgtcatccgcagtcgcgccgcgatgaggtgcagagctggtctgacgaacgcttttgtcaggagctgcagcaggcgttcggctggcggctggggcgtattacccacgccgggaagcgcagcgtctatccgctggccctcaccaccgccagccgcgcggtgtcgcaccgcctggcgctggtcggcaacgcggcgcagacgctgcacccgatcgccgggcagggctttaatctcggcctgcgcgatgtgatgagcctggcggaattactcgctgacgcccatctcagcggcgaagatttcggtcattatccgctgctgtgccgctatcaggcgcgcagggcaggggataaagccgccaccatcggcgtgaccgatgggctggtgcatctgtttgccaaccgttgggcgccgctggtggcggggcgcaacgtcggtctgatggcgatggaattatttaccccggcgcgcgatgcgctggcgcagcgtaccctcggttgggttccccgttaaggagtagaacgtgcaaagtgttgatgttgccattgttggcggtggaatggtggggctggcggtagcctgcggtctacagggtagcggcctgcgcgtcgcagtgctggagaaagcagagccgcgaccgctggccgccgatgcgccgccggcgctgcgcgtttcggcaattaatgccgccagcgaaaagctgctgacaaagctggacgtctggcgcgagatcgtcgcccagcgggccagctgctatcacggtatggaagtgtgggataaagacagctttggccacattagcttcgatgaccagagcatgggctttagccaccttggctatattatcgaaaatgccgtagtgcatcatgcattgtggcagaaggcgcagcgttgcgctgacgttaccctgctggctccggcggaacttcagcaggtggcgtggggcgagaatgaagcctttctcagcctgcaggacggcagcatgctgaccgcgcggctggtgatcggcgccgatggtgccaattcatggctgcgcaataaagccgatattccgctgaccttctgggattaccatcatcatgcgctggtggcgaccatccgtaccgctgagccgcatcaggcggtggcccgccaggcgttccatggcgacgggatcctcgccttcctgccgctcagcgatccgcacctgtgctcgatcgtctggtcgctatcgccgggggaagcgcagcggatgcagcaggctgatgaaaccaccttcaaccaggcgctgaatatcgcgttcgataatcgccttggcctctgccagctggcaagtgaacgtgaagttttcccgctgaccggccgctatgcccgtcagtttgccgcccaccgactggcgctggtcggcgatgccgcgcataccatccatccgctggccgggcagggggtcaacctcggttttatggatgccgccgagcttattgacgagctgaagcgcctgcacgctcagggcaaagatatcggccagcatctttatctgcgccgctacgagcgcagccgcaagcacagcgcggcgctgatgctggcgggcatgcagggcttccgcgaaatgttctccgggagccatccggcgaagaaatttcttcgcgatgtgggactcaaactggccgatacgctgccgggcgtgaaaccgcagctgattcgccaggcgatgggcctcaacgatctgcctgcctggttacgttaaccgcgtcacacttctttcacccggcctgggcgccgggttttccccctcatttgaaatattctaatttcacctcttttttcgcattagatttattaatgcgcccttttttttgttaaagaaattagagccgtaaaatcgcataaaacaccatcattacctaattgccgcgccgttaatgttaattttatgtggcgtaaatcgcttttttccagtcaataactctgtaggcttttcggcggattttagccataagctaatgtgatgccctgaatgagcttatggtttagcgccgggttcggtggtaagttcaggccaaagataacgtttgcgtcggcgtccgtcagcgatgccgacgccgaatttcgtggcgcaaaatcgccgacaatttcgtggctggttccgttttattcgatgaggaaaagatggctcaacagactccgttgtatgaacaacacacgctgtgcggcgcgcgcatggtggatttccatggctggatgatgccgctgcattacgggtcccagattgatgagcaccatgcggtgcgcggcgatgcagggatgttcgatgtgtcgcatatgaccatcgtcgatttccacggcagccggatccgcgagttcttgcgctatttgctggccaacgatgtggcgaagctcaccaccccaggcaaagcgctctacaccggcatgctgaccgcctccgccggcgtcatcgacgacctgattgtctatttcctttctgaagattatttccgcctcgttgttaactccgccacccgcgaaaaagacctcgcctggatctccgaacaagctgaaccttacggccttgaaattaccgttcgcgacgatctgtcgcttatcgcggtccagggcccccaggcgaaagcgaaggcggcgacgctgtttaccgacgctcagcgtcaggccgtggaaggcatgaagccgttcttcggcgtgcaggcaggcgacctgtttatcgccaccaccggctataccggcgaagcgggttatgaaattgcgatgccgaacgagcaggcggctgatttctggcgcggtctgctggacgctggcgttaagccgtgcggtcttggcgcgcgcgacaccctgcgcctggaggctgggatgaacctgtacggccaggagatggacgaaggcgtttccccgctggcggcgaacatgggctggactatcgcctgggagcccgccgatcgtaacttcatcggccgcgaagcgctggagatgcagcgtgaaaaaggcaccgagcagctggttggcctggtgatgaccgagaaaggcgtcctgcgcggtggtctgccggtccgttttaccgatagcgacggtaatcaaaaagaaggcattatcaccagcggcaccttctcgccgacgctgggctacagcatcgcgctggctcgcgtgccggccgggattggcgacaccgcggtggtgcaaatccgtaaccgtgaaatgccggtaaaagtgactaaacctggttttgtacgcaatggcaaagccattgtgtgatttcccttttttggagatgaattgatgagcaacgtaccagcagaactgaaatacagcaaagaacacgagtggctgcgtaaagaagcggacggtacctataccgtagggatcaccgagcacgcgcaggagctgcttggcgatatggttttcgttgacctgccggaagtgggcgccaccgttgaagcgggcgccgattgcgcggttgccgaatccgtgaaggcggcctccgatatctacgcgccgattagcggtgaaatcgttgccgtcaacgaagagctgaacgactctccggaactggtcaacagcgacccgtataccgacggctggatcttcaagatcaaagccagcgacgaagcgcaggttgccgcgctgctggatgccgccgcgtatgaagctttactggaagacgaataaatacgcttcatccttcacgctgcaggggcgttggcttcctggctccccccggtcacttacttttgtaagctcccggggagtcgctgtgtcgccgccttcctgcaacgcgaatgattttgcgtattctggcccggtaagcatcagcgcttgccgggcaaaccagtcagacaaccacgattcaccgcacgtttcaggaaccatcgctcatgactcagactttaagtcagcttgaaaaccgcgacgcctttattgaacgtcacattggcccggacgctcagcagcagcaagagatgctgaagaccgtcggcgcggattcgcttaacgccctgatcggccagattgtgccgcaggatatccagctggcgaccccaccgcaggtgggcgacgcgactaccgaattcgccgcgctggcggagctgaaggcgattgccagtcgcaacaagcgcttcaagtcttacatcggcatgggctataccgccgtgcagctgccgccggtcattcagcgcaacatgctggaaaacccgggctggtataccgcctataccccttaccagccggaagtatcccagggccgtctggagtcgctgctcaacttccagcaggtcactctggatctgaccgggttggatatcgcttccgcttcgctgcttgatgaagccaccgccgccgccgaagcgatggcgatggccaaacgcgtcagtaaactgaagagcgccaaccgcttcttcgttgccgccgacgtccatccgcaaaccctggacgtggtgcgcacccgcgcggaacccttcggcttcgacgtcatcgtcgatgacgccgacaaagtgctcgatcaccaggatgtcttcggcgtgctgctgcagcaggtgggcaccaccggcgaaatccacgattacagtaaactgatcgccgagctgaaagcgcgcaaagtgattgtcagcgtcgccgccgactttatggcgctggtgctgctgacggcgccgggcaagcagggcgcggatatcgttttcggttccgcccaacgcttcggcgtgccgatgggctacggcggcccgcacgcggccttcttcgcggcgaaagatgaattcaaacgctccatgccgggccggattatcggcgtatcgaaagatgcggcggggaataccgcgctgcgcatggctatgcagactcgcgagcagcacatccgccgtgagaaagcgaactccaacatttgtacctcgcaggttctgctggccaacatcgccagcctgtacgcggtattccacggcccggcgggtctgaaacgtatcgctggccgcattcatcgtctgaccgacattctggccgacggcctgcagaagaaagggctgaagctgcgccatgcccactacttcgacaccctgtgcgtcgaagtggcggataaagccgcggtgctggcgcgtgccgaagccctgctgattaacctgcgcagcgatattcacggcgcggtgggcattacgctcgatgaagcgaccacccgcgaagatgtgctgaacctgttccgcgctatcgtcggcgacgatcacggtctggatatcgataccctggataaagacgtggcgctggatagccgttcgatcccggcggcgatgctgcgcgacgatgcgatcctcacccatccggtgtttaaccgctaccatagcgaaaccgagatgatgcgctacatgcacgccctggagcgtaaagatctggcgctgaaccaggcgatgatcccgctgggctcctgcaccatgaaactgaacgccgcggcggagatgatcccgatcacctggccggaatttgccgagctgcacccgttctgcccggtcgagcaggcggaagggtatcagcagatgatcgcccagctttccgactggctggtgaaactgaccggctatgacgccgtctgtatgcagccgaactccggcgcgcagggcgagtatgctggcctgctggcgattcgccactatcacgagagccgcaacgaaggccatcgcgatatctgcctgatccctagctccgcgcacggcaccaacccggcttccgcgcagatggcgggtatgcaggtagtggtcgttgcctgtgataaaaacggcaacatcgatctcgccgatctgcgtgaaaaagcagagcaggcgggggccaatctctcctgcatcatggtcacctatccgtcgacccacggcgtgtatgaagagaccattcgcgaagtgtgcgagatcgtgcaccagtttggcggccaggtttatctcgacggcgccaacatgaacgcccaggtcgggatcacctctccgggctttatcggcgccgacgtttcgcacctcaacctgcataaaacgttctgcattccgcacggcggcggcggtccgggcatgggcccaatcggcgtgaaagcgcacctggcgccgttcgtgccgggccacagcgtggtacagattgaagggatgctgacccgccagggcgcggtttccgccgcgccgttcggcagcgcgtccattttgccgatcagctggatgtatatccgcatgatgggcgcggaagggctgaagcaggcgagccagaacgcgatccttaacgccaactacatcgctacccggctgaaagacgcctacccggtgctctacaccggtcgcgatggtcgcgtagcgcacgaatgtattctcgatattcgtccgctgaaagaagagaccggcattagcgagctggatatcgccaagcgcctgatcgactttggcttccatgccccgaccatgtctttcccggtagcggggacgctgatggttgagccgacggaatcggaaagcaaggtcgagctggaccgctttatcgacgcgatgctggcgatccgcgcggaaatcgaccgcgtcaaagccggcgaatggccgttggaggataaccctctggtgaacgcgccgcacacccagggcgagctggtgggcgagtggaaccatccgtacagccgcgagctggcggtattcccggcagggttgcacaacaagtactggccgacggtgaagcgtctggatgatgtctacggcgaccgcaacctgttctgctcctgcgtgccgatgagcgaataccagtaagtttgcgttttagctaaacttttaaaggcgctgcggcgcctttatttttttggagggaaggtatgggaatagctcttattagcggcgcgagccgcggcataggccgggcgacggcgctgctgttggcgctggaaggatataccgtggcggtcaattaccatcacaacattaacgccgccaccgaggtggtgaataccattgtggcgtctggcggcaaagccacggcgctgcgggcggatatcagcgatgaagcgcaggtgatggcgatgtttgaggcggttgaccgcatgggcgaaccgctggcggcgttggtcaacaatgccgggatcctgtttacccaatgtacggtagagagcctgagcgccgagcgtattaaccgcgtactggccaccaacgtcaccggatactttctttgctgtcgcgaggcggtaaagcgcatgtcacatcggcatggcggcaagggcggggcgatagttaacgtgtcgtcggcggcgtcgcgccttggcgcgccgggggagtacgttgactatgccgcgtcgaaaggggcggtagataccctgaccaccgggctggcgctggaggtggcggcgcaggggatccgggtcaacggcgtgcgtccggggctgatttataccgagatgcacgcctccggcggtgagccgggacgcgtggatcgagtgaaaggttcgctaccgatgcagcgcggcggccagccggaagaggtcgctcaggccattgcctggctgctgagcgacaaagcgtcgtatgtgacgggtagcttccttgaactggcgggcgggaaataacccgtagatgtctattgcccggcggcgctgcgcttgccggccctacggggtcaaagccgaatggtaggccgggtggcggatacgccttacccggcataaaaaccgctaaagcccgacggcctaccaggaggccagccacagccgcaggcgcattccccaactgctggtccagccggtggtaaccgactttacctcgccttgagaaatgaccaccagcgttggcgttacctggatatcccattgccgcgccagctggccgcttggatcattcaccgtcggcagcgtcattttcttcctggtcagccacttctccagcgtgacgttatcgccggaacgcagggctaccgtcagcacattgccgccgtcggcggcaagcgatgccaccgacggcgtggtatagcgacaaactccgcaccaggtcgcccagacgtacagcagcagcggcttttgctggcttatggcgttcagatccagcgtcctgccgtcgagtgtctgcagcgatgtggcgctgacgttttgcggcagcgcgggctggcgaaaataatccaccgccaggctcaccgccgcgccaatcagcagccacaccgccagctcgcgcagccagcgcctgattttactggccacgggctttcgccagctgttctttcaccagcccctccagctcatcagcagggatcgcgccggccaccatctgatcgccgatgatggtcgccggggtgccctgaatattcagcacctgcgacaaaatcaggttcatcttcagcgaatccatggtcttgtcatcgatatttacgctatcggtagcggttttcttctgcgcggcggcgatactggcgtcatcgtgatagccttttttcgccatcagccgctgatgcagcgcccagaatttatcgggctgctgacgccaggtggagagcgcgattttagcggcattcaccgaactctgccctttaaacggcagcagcttaacgatgagctggatgtccggattatcgtggacgattttttccagcagcggatcaaactgtttgcagtaagggcagttgtaatcggtaaacgagacgattgtgagttttggctctttcgcgccggtgcgcgggctattcggatcgttaaacagcagctgggctaactggtcattaccgttcgattgtggttcttccgccggggcggcgaagctgaaggccgatacgcacagcagtaataaggcggtgatagctctcatgttattttcctttagcggcggacagggtagcgataagttgttcgcggtctaacagcgcaggcagaatctgtccctgcggcaattccggtccgtaaatctggttaaacggcaccgcggcgctgccgcgtgcggttaaaaactggctaatgtcagcggaggggcggctccagtcgccgcgcagggcgactacgtctggcgctaacagcgcctgctggacgtcgtcgcgcagcagcacgttgtatttattggctttacaggtcacgcaccagtcggcggtgacatcaataaatacccgcttatgctccgccagggcgctggcgatagcctgctcgctgagcggctgccagttaacccggtcgcggcgcgggccctggccgtcctgttgggcgacaaaggcgacggcgcccgccaccacgatggccagggcgcccgcgcgcagcgccgtccgccagcggtagcgccaggcggtggccactagcagggcgatggccagaatcaccagcagggtaagcaccggcgtacggccgatgtggatcgtcagcaggctgaccagccatagcgctgaaccaagcatcattagccccagcaccacccgcagatgattcatccagcggcccgggcgcggtagacgttgcgccagacccggccaggcaacgatcagcagccacggcaggctcatgccgatccccatggcgaagaaaatgccccacagcagcggcaggggcgccaccagcgccaccgacacggcggtaccgaggaacggcgcggtacagggcgtcgccagcagggtggcgaaggcgccctgccagaaatggcccattaagccgttgccgccgcgggtggcgaggaaagtgctggcgctggaggagaggcggatttcgaacagccccaataaactggcgctgaacagcaccatcaccagcgccatcgcgccgataaaccacgggttctggaactggatgccccagccgagcgcctgattccccaggcgtagcgcggtcatcatcagcgccagcgccaggaacgagacgacgatcccgcacaccgaggcgaggaactgccgccgcaccgcgccgcgttcgcgacgttcggtttgcaccagcgagccgagtttcatcgccagcaccggcagcacgcacggcatgacgttgaggattagcccgccggccagcgccatcagcagcacccagcctaacgccagccccggcgcggcgctgccggcggcgatggcgatatggctttcctgcgcctgaccgctatccgccagcaccagcgacagcgttttgccgctcaggtccggcgccgcttcgccccagctatcggtgaccggtacggtggtggtcaacgtaccgccgcggctggtaaagctcggcttaccgaaatcgacatcctccatgctgtcgataaacagcgctggctgctgccagccggcatcgcggcgggcggtcaccgtcagtttgccgctgacgtagctggcggtcagttgcgaagtcaggccatcgcgcagcggcagtgtgcccatcgcgcgggtaaaatcataattaaatcgctcccccgccggagtcgtcatatccagcgaaaagggatagtcagtgagaatacagacattgctgcaggtagagagcgtcaggacgccgctaagcgtcggtggtatcttcccgcgcagcgtcatcggaaagctgacgtcgccgtgatagccctgagtggaaatgcccgcgacgtcgaagcgctgcggcgtcggccagcgccagttcacctccagcggcgtgtgccaggcgatagccggcgcgatgccgccttcccctggcgagcgccagtaggttttccagcccttttccagcgctacgtctaaaagcaggcgagtgtcgccattgctctcggtttgcgcccgcaggcgcacgctggcgtgttgattgtcggcggcgcgcagccagccgctgtcggcggcctggctgacgggcagccatagccaaagcaggcagaccagtagtcgcctgaataccatatacataagtttgctccgtaagtgatgaattaacctgaactgtcaggagaatcaatcactcacggaagacgcataatcgcagatgcacccgcaatcggggtgaggagataacgcggggaggccactggcgttcgatacgcggcgggatcgccgccagcaccgccagcagcagggtgatagccaacagtgccccttcaaacagcatcggcggaacggccatcagcgacttggcgctgagctcgcacggcgtgaccggcgcctcggcctgatcctggtttttctgtagcgacgggctgtcggcggtgaggttcatgaccagcgcgtgcatcccggccatccgttgagcggtgcaggttagcaccaccagacaggccaggaggacaaaaagaatggctttgcgttgtcgcttaatcatgattgcctcaaatattcacgaggcttatcttaacgggcgaacgggttttggcaatggtaaagctgtaaagaagtgtctggcggataagcaattagccctcccccggccgggagagggcggttagttacaggttctcaccgttgctggcgatgacctctttgtaccagttaaagctcttcttgcgcgagcgggacatgtcgccggtgccatcgtcgtgtttgttgacgtagatgaagccgtagcgtttgctgtactgcccggtggtgaaggagacgcagtcgatgcagccccatggggtatagcccagcagatcgacgccgtcataagtgaccgctttgatcatctcttcgatgtgggcgcgcaggtagtcgatgcggtagtcatcgttgatgctgccgtcggattctactttgtcgtaggcgccaaagccgttttccacgataaacagcggcttctgataacgctcatacagttcacacagagaatagcgcaggccgaccgggtcaatctgccagccccagtcggaagctttgacgtgcgggttcggcacgctgccttcgaaaccggaaatggcgtcgccagtgccgccctcggctttcaccgcgttggtcatgtagtagctgaagccgagataggcgcaggtaccttcgcgcaggatctgcgcgtcgccgtcttccatcctgatgttgaagccgcggcgttcccattcattcaacacatagctcgggtagtaaccgcgcagctggacgtcggtaaagacgtagcgctcgcgcatcgactcctgggcgaacatgacatcttccggtttgcaggagtaagggtagagggcgaccatcgccagcatgcagccgacctgcatgtccgggttgatgcgccgcgccgctttcaccgccagcgcgctggccacgaactggtggtgcagcacctggtacatggtctcttccggattgtcatgctcggtatagaccaccccggagcagcagtagccgaacagcggcgcgcgccagttgcgctggttgttgatctcgttaaaggtcatccagtatttcactttgtgcttatagcgctcgaagaccacttcggcgaagcgtacaaagaaatcgaccactttgcggttggtccagccgccgtactgctgcaccaggtgcaggggcatctcgaagtgggagagggtgatcaccggctcgatgttgtatttcagcagctcgtcgaacatgtcgtcgtagaacttcagtccctcttcattcggctgggtttcgtcaccctgcgggaagatgcgggtccaggcgatagaggtgcggaagcacttgaagcccatctcggcgaacagtttgatgtcttctttgtatcgaccgtagaagtcgacggcttcgtggttcgggtagtattttcccgcttcgacctggtgggtgatttcgcgcggcacgccgtgcgccccgccggtcaacacatcgcagatgctggggcctttgccgccctgatcccagccgccttcaacctgatgcgcggcgaccgcgccgccccataaaaaatctttcggaagggttaattttttcatcctggctaatctctctaataactattgttctggagtctagcaaagtgaaagtgaatgtcacgatataacaaattccgccaaaggtaatatgttacatcaaaaaaacaggctgttatttttagctgattttgcgcgctaatttacgtccgagggattcgagaatatagatcactggaatttgcgttgtaatatcgtagacgccgccaatgcgcgtctgcggcacgtgccaggagagattgaaatcagccagtttggccagccgcgaatgctcatggctggtaatcgacatcaccttgcaatgatgcaggctgaactggctggcaaagcgcaggatctcttccgtctcgccagagacggaaagcacgatcgccagcgcgttgcgggccatatcgttggttacaggaaaataggggtcgtcaatatggttgctgaatttaccgacgttggagaagaagcgtgcgccatatttcgccagcgcgccggaggtgccggcgccgacaaaaataatacgttcggaggcgagaataatatcgacggcctgctcgagtaattcatcaaactcgtcattattgacgcttttaaaaaagctcattatttcgctggcgccgatatttgcctgttgaggctcattctgctcgagatataatttaaagcgcacgcgaaattcagagtagccctcgcactgcagtttgcggcagaagcgtaacacggtggtcgtggagaccccggcggcctcggccagttcgcggatggtcatgtacatcactttgtcacgatttttaatgacgtagtggtagaccatcatctcaagattattgagactggcgacagcggcgtgggagaacatactcacagggcgaactcacaattcataatgaccaggacggaattatatcatgcaggccaatgacattaccttttttcagcgttttcaggacgacatcctcgccgggcgcaaaaccatcaccattcgcgatgcagcggagtcgcactttaagcccggcgatgtgctgcgcgttgggcgctatgaagatgacggctatttttgcaccattgccgtgaccgcgacctcgacggtgacgctcgatacgctgaccgaacagcatgcgcaacaggagaatatgactctcgggcagctgcggcaggtcatcagcgacatctatcctggcgagagccagttttatgtcattgaattcaaaacgctttaagataatcaggaacagctgtgagttgaaataaaaatgtaactttatgattttaaagtatttacaaatatacatcgttttattttagctaacaggtgttcactggaatcattctcagttaccctaagtgggcaatgaaagcgttcttgttttcacggagtccagtatggttcgcaaaccattaatcactcagggatattctctggcagaggaagttgccaacagcatcagccacgggatcgggctggtgttcggtatcgttggccttgtgttgctgctggtgcaggcggcggatacaaacgccagcgcgacggcgatcgccagctacagcctgtacggcggcagcatgattatgctgttcctcgcttccacgctctatcacgcgatcccgcatcagcgggcgaaacagtggctgaagaaattcgaccactgcgctatctacctgttgattgccgggacctacacgccgtttttgctggtggggttgaattcaccgctggcgaaggggctgatgatcgtcatctggagcctggcgctgctggggatcctgtttaagctgaccatcgcgcaccgctttaaaattttgtcgctggtgacctatctgaccatggggtggctgtcgcttatcgtggtctatcagctggcagtgaagctggcggtgggcggggtaacgctgctggcggttggcggggtggtgtactcgctgggggtcatcttctacgtctgcaaacgtattccttataaccacgctatctggcacggcttcgtgctcggcggcagcgtgtgtcacttcctggcgatttatctttacatcggccagtcctgataaacatcccacggtggcgctgcgcttaccgtggctacaaaatactgcggccgggtagcccggctaaggcgcaagcgccgcaagccgggaacttttccttaattttcttccagcgaatacggcaatggtttgatgctcaggctgccagcatcgtcgcgtacacggaacacgctgtccggttccatgtcgttattcatcactacctggaccatcaggcttccgtcatccagctgtacggctgccagcaccgtaccggtgcggcgccagttgtcgcccatcttcagctccaggtcttccccggcttccggcacccggctggcggtccctgacagcgtccacagcgcgcgcttattggcgccgcggaatttcgccctcgcgaccatttcctggccggtgtagcagccttttttgaagctgatgccgcccagcgcctgcaggttggtggcctgcggaatgaactgcccgctgttggcgctgtcgataaccggcagaccggcttcaatattcagcgccagccactgttggctgttgttaaactgcgcttcgccgcgcaacgcgtcggtgacgcggttggcggtgtcgacatcggtcaccagcaggaagcgctcgcccgggtgttcaaaccacagcaggctggtagcgccttcgctgaccaccggggtggcagcgtcgggcaaggcggcgaacagcggcgccagcgcggcgcgcgcctggaagccggccacccccagcagaaccagatcgtcgttggcggcgatggtgactttggagaagacggcatattttttcagctcggtcagctgcgcgtcgcgcaggctgcggcgctcaatccacgcgaagccgccctcgcgacggaatacgcgcaggttgctccacatcttgcctttggcatcacagtgggcggcaagcagatgctgggcatcggtgagatgactcacatcggcggtaatctgcccctgcagatatttttcgctgtccggcccgctaattgtcgccagcgcccagtcatccagggtcatcagcgttaacggcagacgagcggaagaggaaggctgacgcggaggaaaaggtgtaaaagccatagtcatatcctgaatcgcttaacgcagtgtgtgtgaccaatggtaaaagagctatagtgcattgcaagtgctttcaacaggccatttgtgcgctggcgtgagacagccgcctgacgcagggaatcaataaacccatcattattttaaggtttttatggaaggatgctcgcattcagcgatattcctgtaaagttacggcagaaaacgggttaaactaacctatattttgctgctggaaggtcaacatggacattaacaataaagcacgtatccactgggcatgccgccgcgggatgcgcgaactcgacatctccatcatgccgttctttgagtatgagtacgataccctcagcgacgctgacaaacagctgttcattcgcctgctggaaaatgacgatccggatctgttcaactggctgatgaaccacggcaaaccggccgatgcggagctgcagcggatggtaaccttaattcagacacggaatcgggaacgtggtcctgtggcaatctgatctccgtatctcctggcgcgcgcagtggttttccctgctgcttcacggcgtggtggcggccctggtgctgttggttccctggccgctgagctataccccgatctggctgctgctgctgtcgctggtggtcttcgactgcgtgcgcagccagcggcggatccatgcccgtcgcggggagataaaactgctcaccgattcccgtcttcgctggcaaaacgccgaatgggaaatcctcgggacgccgtgggttatcaatagcggtatgctgctgcgtttgcgccatgtcgatacccggcgcggacagcatctttggctggcggcggacagcatggacgccggagagtggcgcgatctgcgccggctggtgctgcaaaaaccggcgcaggagtaagccgcgtcaggaaaagtgttcggccatttcgccgaggatctgctcgcaccagctctggatgcgctcgtcgctcaggtcgtactggttggtttcatccagcgccaggccaacgaacagttggccatcggcgatcactggtttcgggctggtgaactcatagccttcggttggccagtagccgacaaacttcacgcccttggtcgccagcttgtcatgcagcatgccgagcgcgtcaaggaaccattcgccgtagcccagctgatcgcccatgccgtacagcgcgacgatctttccctcgaggttcagggtgtccagctgatcccagaccgcttcccagtcttcctgaatttcgccgaaatcccaggtcgggatgccaaggatcagtacgtcgtactggctcatcagcgcgggggagtcatctttcagattgtgcagcgtcaccagctcggggccgatgatatcgcggattttctccgcggccatttcggtgtagcaggtactggagccgtaaaacagacctatattcatcgcgtaaacatctcgattcttgccgtgaatggcgggcagtgtaccagaaaggcgtcctcttaaggcataatgagagcgtttaacgaacaatgaggccgatgtgaaacaggatctggcactaatcgaacagtttctcgatgccctttggctggagcgcaacctggcggagaatacgctcagcgcctaccgtcgcgatttgacgatgttagttgagtggttgcaccatcgcggcctgtcgctggcaagcgttggcagcgacgatctgcaggcgctgctggctgagcggcagtccggcggctacaaagccaccagcaccgcgcgcctgctgagcgccgtgcgccgttttttccagcatctgtaccgggaaaaaattcgcccggacgatcccagcgcgctgctggcctcgccgaagctaccgcagcggctgccaaaagatctcagtgaggcgcaggttgagcgcctgctgcaggcgccgctggtggagcagccgctggaattgcgcgataaagcgatgctggaggtgctgtatgccaccggcctgcgcgtctcggagctggtggggctgacgatgagcgacatcagcctgcggcagggcgtgctgcgggtggtgggaaaaggcaacaaagagcggctggtgccgctgggggaagaggcggtactgtgggtggaaaattacctcgagtatggtcgcccctggctgctgaacggcgtggcgtcggatgtcttatttcccagccagcgcgcccagcagatgacgcgccagaccttctggcatcggattaaacactatgccgtactggcggggatcgacagcgaaaagctttccccgcacgtgttacgccatgcgttcgccacgcatttgctcaatcatggcgccgatctgcgcgtggtgcagatgctgttaggacacagcgatctctccaccacgcagatatacacccacgtggcgaccgagcgtctgcgacaacttcatcaacagcaccacccgcgggcgtgagtgctgaacaaaaggactgagtatgaaaaaaggtttattgatgttcaccctgctggcggcctccctttcaggagcggcgcacgccgatagcgcggcaattaaacagtcgctggcgaagctgggtgtgcagagcaccgatattcaaccatcgccggtttccgggatgagcacggtgctgaccgacagcggcgtgctgtacgtgaccgacgacggcaaacatattatccaggggccgatgtacgacgtgagcggcgcgcagccggtcaatgtcaccaaccagctgctgctgggtaagctgaacgcgctgagcaatgagatgattgtctacaaagcgccgaaggagcagcacgtcatcaccgtcttcaccgatattacctgcggctactgtcataaactgcacgagcagatgagcgactacaacgcgctggggatcaccgtgcgttatctggccttcccgcgccagggtctgcaaagccaggcggagcaggacatgaaggccatctggtgcgcgaaagatcgcaacaaagcgctggatgacgccatgaatggtaaaggcgtgcagccggcgagctgcagcgtagatatcgccaaacattacaccctcggcgtgcagatgggcgtcaacggtacgccggcgatggtcctcagtaacggcatggtgctgccgggctatcaggggccgaaagagctgaaggcgttcctcgatgagcacaaaaaacagacaagcggtaactgattcgcgtgaaacaacagatacaactacgccgccgcgaggcggttgacggcgtcgaactccccgccgacctgccgccgctgctgcagcggctatatgccagccgcggggtgcgcagcgcgcaggagctggagcgcagcgtcaaaggcatgctcccctggacgcagctcaccggcgttgaaaaagcggtcgagatgctacatgacgcgttccagaaagggttgcacatcgtggtggtcggtgattttgacgccgacggcgccaccagcaccgcgctcagcgtgttggccctgcgcgcgctgggttacggcaacgtctcctatctggtgccgaaccgctttgaagacggctacggtttaagcccggaagtggtcgatcaggcccatgctcgcggcgcgcagatgatcatgaccgtcgacaacgggatctcgtcccatgccggcgtcgatcatgcccatgcgctggggatcccggtgctggtgaccgatcaccatctgccgggcgagacgctgccggcggcggaagctatcgttaatcccaacctgcgcgattgcgacttcccgtcaaaatcactggccggggtgggggtggcgttttatctgatgctggcgctgcgcacttttctgcgcgataaaggctggttcgacgctcgcggcatccccgcgccgaaccttgccgagctgctggatctggtggcgcttggcaccgtcgcggacgtcgtgccgctggatgctaacaaccgtatcctcacctggcaggggttaagccgcattcgcgccggcaaatgtcggcccggtattaaggcgctgctggaaattgccaaccgcgatccgcaaaagctggcggccagcgacctcggtttcgccctcgggccgcgcctgaacgcggcgggacggctggacgacatgtcggtcggcgtcgcgctgctgctgtgcgacaacatcggcgaagcgcgggtgctggccaacgagctcgatgcgcttaatcagacgcgcaaagagattgagcaggggatgcaggcggaagcgctaacgctctgtcagcagctggagcgcagcgccgataccctgcccggcgggctggcgatgtaccatccgcaatggcatcaaggggtagtcggcattctcgcctcgcggattaaggagcgcttccatcgcccggttatcgcttttgcgcctaccggcgacggcacgctgaaaggctccggtcgttccattcaggggttgcatatgcgcgatgcgctggagcgccttgatacgctttatcccgggctaatcctgaagttcggcggccacgcgatggcggcgggcttatcgctggaggaggcgcgttttgaagagtttcaacagcgcttcggcgagctggtgaccgaatggctggatcctgcgctgttgcagggcgaggtggtttccgatggcccgctggcggcggcggagatgagcatggaagtggcgcagatgctgcgcgacgccgggccgtgggggcagatgttcccggaaccgctgtttgacggtcgttttcgcctgctgcagcagcggctggtgggcgagcgtcacctgaaggtgatggtcgaaccggttgacggcgggccgctgctggacggtatcgccttcaacgttgatacttccatctggccggataacggcgtgcgtgaagtccagttagcctacaagctcgacatcaacgagttccgcggcaaccgtagcctgcagctgatcatcgatcacctctggccaaattgacaacagtgtaggaataagggcgcgaatccggtagaattccgctcttatcaccgcattttgacaaatccattaaaagaaaccgaccatgtttgaaataaatccggtaaaaaaccgcattcaggacctcacggagcgctccgacgttcttagggggtatctttgactacgatgccaagaaagagcgtctcgaagaagtaaacgccgagctggaacagccggacgtgtggaacgaacccgaacgcgcccaggcgctgggtaaagagcgttcttccctggaagccatcgtagataccctggatcagatgtcccaggggctggaagacgttgccggcctgctggatctggccgtggaagcggacgacgaagagacctttaacgaagccgtcgccgagctggataccctggaagagaagctggcgcagcttgagttccgccgcatgttctccggcgaatacgacagcgccgattgctaccttgacattcaggccggttccggcggcaccgaagcccaggactgggccagcatgctgatgcgcatgtacctgcgctgggcggaagcgcgcggctttaagaccgaaatcatcgaagaatccgaaggtgaagtcgcggggattaaatccgtgaccattaagatcattggcgattacgcctacggctggctgcgtacggaaaccggcgttcatcgtctggtgcgtaagagcccgttcgattccggcggccgccgtcatacctccttcagctccgcgttcgtttacccggaagtggaagacgatatcgatatcgaaattaacccggccgacctgcgcattgacgtataccgcgcctccggcgccggtggtcagcacgttaaccgtacggaatccgcggtgcgtattacccatatcccgaccggattggtgacgcagtgccagaacgaccgttcgcagcacaagaacaaagaccaggccatgaagcagatgaaagcaaagctttatgaactggagatgcagaagaaaaatgccgagaagcaggcgatggaagacaacaagtccgatatcggctggggcagccagatccgctcttacgtgctggatgactcgcgtattaaagatctgcgtaccggggtggaaacccgcaacactcaggcggtgctcgacggcagcctggaccaatttatcgaagcaagtttgaaagcagggttatgaggaaccaacatgtctgaacaacaagcacagggcgctgacgcggcaattgaccttaataatgaactgaaaacccgtcgcgagaagctggctgcgctgcgtgagcagggcgtcgctttcccgaacgatttccgtcgtgaccatacctctgaccaactgcacgctgacttcgatggcaaagaaaacgaagagctggaagcgctgaacgttgaagtggccgttgctggccgcatgatgacccgtcgtatcatgggtaaagcgtccttcgtgaccctgcaggacgtaggcggccgcatccagctgtacgtggcgcgtgatgacctggcggaaggcgtttataacgaccagttcaaaaagtgggacctcggcgacatcatcgccgcccgcggtaagttgttcaagaccaaaaccggtgagctctctatccactgcaccgagctgcgtctgttgactaaagctctgcgcccgctgccggacaaattccacggcctgcaggatcaggaagcgcgttaccgtcagcgttacctggacctgatctccaacgatgaatctcgtaagaccttcaaagtgcgttcgcagatcctggcaggcatccgtcagttcatggttggccgcggctttatggaagtagaaaccccgatgatgcaggtgatcccgggcggcgcttccgcgcgtccgttcatcacccatcataacgcgctggatctggacatgtacctgcgtatcgcgccggaactgtacctcaagcgtctggtggttggcggcttcgaacgcgtcttcgagatcaaccgtaacttccgtaacgaagggatctccgttcgtcataacccagagttcaccatgatggaactctacatggcttatgcggattataaagatctgatcgagctgaccgaatctctgttccgcaccctggcgcaggacatcctcggcaataccgaagtgccttacggcgaccaggtgttcgacttcggcaagccgtttgaaaaactgaccatgcgcgaagcgatcaagaaataccgtccggaaaccgagatggcggatctggataactttgattccgcgaaagcgatcgctgaatctatcggcatcaaagtggagaagagctggggtctgggccgtatcgtgaccgagatcttcgaagaagtggcggaagcgcacctgatccagccgaccttcatcaccgaatacccggcggaagtttctccgctggcgcgccgtaacgacgtcaacccggaaatcaccgaccgctttgaattcttcattggcggccgtgagatcggtaacggctttagcgagctgaacgacgccgaagaccaggcgcagcgcttccaggatcaggttgatgcgaaagccgcaggcgacgacgaagcaatgttctatgacgaagactatgtcaccgcgctggaacacggcctgccgccgaccgctggtctgggtatcggtatcgaccgtatggtcatgctgttcaccaacagccacaccatccgcgacgttattctgttcccggcgatgcgtccgcagaaataatcgcccttcgcgaagagcaaaaaacccggcttgccgggtttttttatgtctgatgtgaggtcctaaggctggcgtagcctggctcagcgcagcgcaagccggggatcccggatggcggcgtaaacgccttatccgggctacgcaatggcgcagaaccgtaggcctgtgcaagcgtagcgccgccaggcattaatgacaggcacagggctgcgcctggcctggagaatagtcagcttacccgcgcagacgcgcaacaaagtcggtcagcgcctggcgggcgtcccgattttccgcttccagcaccatccacgggctgaacgcccacggcgtggcggccagcgcgcttaacatggttgccaggtcaacccactgatagtccatgacttcatcgtcgttaggctgcacttcgcttaccacgcgcgcggcatataccgggcacacttcgttctcaacgataccgtttggggcgaccgcccggtagcggaaggccgggtgaaccggcgcgatatcagagatctccacaccgagttcgaagcgacagcggcgcgtgacggcctgctcgaaggtctcgccctgctgggggtgtccgcagaccgagttggtccataccccgggccaggcttttttgcccaacgaacggcgagtgaccagtaactgaccctgctggttaaacagccagcaggaaaacgcgagatgtaaaggggtatcaaacgtatgggcggcatacttctccagcataccggcaggctgatcctgctcatccagcaaaatgacgtgttccccggccatgacgactcctgaaaataaaaaatgacccggcacaaacccgccgggtcatgtactcaggccactagggtagcccataaatgggagaaaggcattaccaaaacaagccctggcagcatgttggcgaccgggaaaagcttaatgttgcagatgcgtaatccagtggccaccatcagcaatccaccggcgcaggagaaatccgccatcattgacggcgtgatcatcggcagaataaacaccgctagcatcgccagcgccacctgaatcacgatctgcgggatagcgatggtcatcaccgcgtagcccagcagcgtcgcgaagatcccggcggtaaaaagatcgaggatggttttaatgtacaggattgatggatcgccgctcataccttcggtcatggcaccaaaaataccggtaccgctggcgcaaaacaggaccaaaatagccacgaatttttcggtgaactcttcatgacctaatccctgaacgggtggaagaactttattaatcaacccgcgcgttgatcccgccgcgctgccgatgcgtttttccagatgcagcagttcgccgaggaaggcgccgagtaccatcgccagcactaccgccggcatatatttcaccttcagtaccagggtgatacccaggccgacggagcagagaccaaaggtcatcggcagggctgttttgacgcgttccggaagttttcctccggccattgcgccgatcaatccgccgataatcacggcggaaccatttacatacggaccaattaacattgcgagttcctgttacgtgtaaagcagctcgccctcaccccagcgcgggatgttattgacctccaggtcaaacaggtcaagcgcgcggtttacgctatgggtaataatgtcatctgcgctttgcggacgctgatagagtgcaggcaccggcggaaagatgatgccgcccatctcggtaactgccgccatattacgtatatggccgagattaagcggcgtctcgcgcgccagcagtaccagccgacggcgttcctttagcactacgtccgccgcgcgggtaagcagattatcggtgagacagtgggcgatagcgcccaatgatcgcatcgagcagggggcaaccaacatccccagcgttttaaacgagccgctggagatggacgcgcccagatggttgatgggatgtaccacgtcagccagcgccatcacttcatctaagcggtaatccgtttccagctcgcaggttttttccgcacctttggagaccaccagatgaacctctatcgccagtggccgcaaaagttccagcgctttcacgccgtactggaacccggaagcgccgctaatcccaatgatgatgcgtggtgtcatggtattcgcccttattcgaagtccggcaggaaacgttttacatcaaccgctttgaacttagagcgctcaaagttgtgtttcagatggaacggtacggtgcagtcgaaaatggttttgcacgacattccctgctgcagcacgctcgggctgtactctggcacctgcgacgggtcgagcggatgacagcgcacacccgggatcattacggtatcgacatcaccctggtagcgggtttgcatcgcccacagcacatcgtcgctatcgaaaatatcaacatcctcatccaccaaaatgacgtgcttcagctccgggaaagcggagaacgccaggagcgccgcctggcgctggcggccttcatcggcaggggaagatttcttaaattgcagtaccgccagtagtttgccgccgcctgccgagtgggcgaagacgttgagtaatttgcccggcatggcgcgctccaccatatcgagaatactcgcttcggtcgggatcccggccatgttgacatgttcttcgcctggtccgacggtggtgcgccagataggctgagtacgatgggtgacggctttgactttaataaccggaatcgcctctttcgcttcaccggtatagcccgggaactccggcattgcgcggccggtatgggtgttctgatcttcgcgtacgcgcacgttcggcaccagttcgccttcgataacgatttcggcgtgggcaatggctttttcattaatagtcttacattgcaccatctccaccgcgcggccacgcagcgcgccggcaatgcttagctcgttgaaacccagcggggtggtcggtggctcaaagcaggcggcgatttcgatagccggatcgacgccgatactgatcgaaataggcagcggctggcccgccgcttccgccttcatgcggaaggcatcgatatgacgacccggcgtcagccacattgatagctcatcgcggctctggacacacaggcgatgaatagtgatatcggattcatgggtttgcgggtcggaggcgtagcacaggcccatagtgatatacggaccggcatcttcttcggtgttagttggcgcaggcagcagtttacgcagatcaaaatcagcatcgctggcgaggtgaaccacttcctggcataccgccgtgccctgtaccatggttgggctaatagcattttcaacggaatctttcagcaaatgacccagttttgccggttcacactgcaggaactggctaacgcgctggcgcgagccgttcagaccgatggccacgctgatatcgtcgaaccccttaattttgttaaagaccatgaccgggccgttcttgcgcgttgggcgctggcaggtgccgccggcgcccacgtagcggtatacgcctgagagctcggcgtgaggatcgacttcggtatcggtctcaacatattcgcccggcagcgtttttaacagtgccagagccgaacgtaaatcatgcaccggtgacggcgtttttttatctgaatttgccatgagtgttcctttaaaaagcaattttgctaagcgcacaatatttttcttcgataaattaaacaaataccgtttaccggatggtcagtagatcaaaaaagttggttttaaaaaaatgttaataaacaattaatcaatatggtgaattcgacgcggctttttatttctcagcgttagtgtgatactgcccggaagataattaatgaggccggtcatggatcttaaacgcttacgctatttttgccgggtagtggaacacggttcggtgagtcaggcagcgaagtcgctcaatatggcgcaaccaccgctcagcaagcggattcaggagcttgaagaagagctgcaggtttcacttttcgagcgccgcggcaaccgcattgaaccgacggaagcggggtatttcttatatcggaaaggctgtgaaattttacgccaggtggaggataccgctcgggagacggccgatattgcgcaaaagacccgcgtggaagtacgtattggcttaactcatctgtaccagaattattttcagcctttattaatggagctctatcggcgcaatcctgaaaccgcgataaatatctcggtgactgactcaagtcatctggaaacattattaaatgaaggcgctatcgatctggcattaatacagcgaccctaccgcggagaaggcttcgattatatctccttcgaccccattaaactggtagcggtcattaataaaaaatgcctgtcgcaaccgccttccaacccctatgactacaatgctctggcggagatgccgctggtgctgctgcaccgggcgaaagattccggcacctatgaaatgttaatggacctgttccgtaaatccggcgttagcgcgaaggtgattatgcatattacccagcccggagtgatcctcgactggctggaggacgggctggaagcggcgacattgctgccatcttcggaagtgaatgccgaaaaacttcctcattgctatgtggttgatgtcttcccctcaccgcaaatattttatccggctctggtgaaattgccgtcgatgccgtatctgccggcgctgatggatattatcgccgggggttatccttttaccgcgccgagggagtagagatcagagaaaaagcgtagagcattggggattgttgcacggactggtatgatattcgccctgattgcgaggtaagtggttgtgttaagtgcaggatgcctgatgatgaaacgcttttatatgacactgatgctggctgcaagcctggtgctggccggctgctccagcacctccgattccggtggcacctacaccgttaaacgcggcgataccctgtacggcatctcccgcaccaccggcaccagcgttcgcgatctggcccgcctgaataacatctccccgccttacaccattgaggtggggcagaagctgaagcttaacggcagcagttcaacgaagacaacgaagaaaaaatcttcctctacgcgcaccgcggcggtcacgccttcgtccgcggtacctcagtcctcctggccgccggtgggacagcgctgctggcgctggccgaccagcggcaaagtggtcctgccttattccaccgccgatggcggcaataaaggtattgatatcgccggaacccgcggccagccggtgtatgccgccggggcgggcaaggtggtctacgtcggcaatcagctgcgcggctatggcaacttgatcatgattaagcacagcgaggattacatcaccgcctatgcccacaacgataagctaatggtgaataatggccagagcgtgaaggccggccagcaaattgccaccatgggcagtacggatgccgactcagtgcggctgcatttccagatccgctaccgggcgacagccatcgatccgctgcgttacctgccgccgcagggaagtaaacctaagtgctaaaaggttattttatcgccagtcagcatccggcaggcttgtcacagggtgcgtaagggctataatgcttctcgcacctcttcgcgggcgtagttcaatggtagaacgagagcttcccaagctctatacgagggttcgattcccttcgcccgctccaaattcaagtctcctgaagtctaccaaactcaattttcccttgataaatcagcggttatagcattctgttagtctattgaactccgacggaagactccgctttggttgcgggatcggcgttttgcgctgctggcgctggagtcgtagcgtttagtgatatttttgcgcttatcctgtttccgcaggatgagtgattttacgcaaccggctcgcgctgacgacgaccgataccgcagaggccgcggcggcgctccacagcgcaacatgaattgacctttcatctgctgccagcagaacggctacggcggcggctcccaggcactgcccgaaagtgcgcataatggataaaacaccggacgcataactcgcgtgctcacgaataacgtttgagagcatttcccggttattgggactctgaaagcagccaaaccctattccgcataccagacttcgcaggcagatatcccacattgaagggctggcgggtaatgtcgccagcaggatcaaaccgacgacaaataccaccagccccagggtggatatcgccggggctgatatcgtgtccgcccaacggcctgcatgcggcgcaatcagcacgatccctaatggccacggcgtaaacagcagggcagacactaccggactgtagccgtattcgctctgaaacaggaagggtagcgcaataaaggtgatcccctggctgacgaaagcaaccatcgacgtgaaggccgcgagggtaaaacgttcatttttaaacatactcggcggcagtaagggatgacccgtgcggcggatttgccagataaaagccatgccgctcagcgcagcgagagccatccagcaaaggctgccgaattgagaagtagcgttctgtaggctgttcgccgccatgatcgtcgaacccaacagcagcgccgacaatatggcgcccacggtgtcgaagggcgcctgcatacggatcgcatcccgcggcagcgctctgaccgccagcagtagggcgagggtgccgggaagaacgtttatcgcaaacagccattgccagctaagggtgtgaaggatcgtaccgcccaataccgggccgatagcggagctcgaggcaatgagcagggcatggaaccccagaatgcggccaagtaagcgtccgggaaatacggacctgagtattgcgggggcaatactcagcgtcgccgcgccgccgatcccctgaagcacgcgcataccgataagcacttcgggcttattcgccagcgcacaacccagtgatgtcagggtaaaggtcgtcaggcccgccagaaatacggggcgataacccagacgggccgcaagcgccgcgaatatcgccagcgtcatcgcagctgccagcagatacccgttggcgaaccagacggcaatactggcaggtacctgcatctcctgagccatggagggcagggcaatgttgatcatggtgccatcaaacacgcccattaaggtggtggtcattattgcggccatcacccgtgcgcgcgccgggccaggcagtccttcgtcgccgggttgactggaaaagagcgtcatcatttgtcctctgagaagagtgtatggatgacaaaactataaagatggcttttaccaggcggaaggcgcactattttcactttattgttgcatcaaacgccttatcttaatgtgctgggaggaagggtaatgtctgatcccgattttaatttgctggtagctctcgacgtactgctgagtgaagcgagtgtcgcaggtgcggctcgtcgtctgaacctcagcacttcggccatgagccggacattaagcaggttacgcgatgtcacaggagacccgatcctggtacgcgccgggcgtaacatggtactgaccccgtgggccgaagcgacccgggatcgcgccaggcgtgcagtgcacgatgccagggcggtattacagccctcaactgaaacgttcagcgcgcaaaatctggcgcgtctttttaccatcagggcaaacgatggttttgtggtggcgtttgggcctgcgcttatagcagcggttgccgacgcagcgccggacgtctgtatacgcttcgcgcctaagccggaaaaaacgtcgcgctatcttcgggaagggctggttgatctggagattggcgttcagagtaatatggggccagaaatacggctgcaacgactgtttgaggatcggtttgttggcgtcgtccgtaaagggcacccgctggctaagcaggctgaaataggcgtgagtgattatgtcgcctggggccatgtggtagcgtcacccgagggcgcgttgcacggatccgttgacgatgcgctggccgaactggggacaaaacgtaaaattgcgagcgtcgtaccgggatttccgacagcactttccgtggcgctggaatcggatcttatcgccatgatacccgcactctatttactcaatcagcaggtaacggaccaggtacaccttttcgagctgccgttcaaaagccgtcgtattacggtatcgcagatgtggcacccaagaatggaacgcgaccccggtcaccgctggctgagagagcaaattcttgcgatatgcggtgtggccaggtcagtcatgactaaggagcctgtatagcgattgctataacatcaacttaagttaatgatgcagttcattgatatttaagatgaaataaattaagtgtagtagctaaattgagatgttcgtctcggggatgcggatgttttcctggactggttatgtatttagcccaagatgttgccggtacttcatcggactcattgcacctactgataccttaattcgcttatcgttataccagcgtatttaactgtccagaaggcagataaatttttccagtgttatgtctgcccattttctgccgtagaacatttcatttttgacccgcccgaagaagcgctccataggactgttatcccagcagtttccgcgccgactcatactctgcttgatccggtatcgccacagtaactgccggaactgcctgctcgtataatgactgccctgattactgtggaacatcaccccgacgggcttaccgcacgtttgccatgccatttccagcgctttcatggtgagtctactgtccacaccttacgaccaggcagaatggtagattcaactatctactgctcacgatgtacgctactgcgtagcatgataagccccttcctttagcttaaatattccaggaatgccctgtggatcagggtttatctttcaatcctaggacaaacggtacggaatcgcgtagagaaggatttaccgcgccgctgtggtcaagtccggggtagagatgaatattagtatgcgtacctgccgcctgcacgtctttggcaaactgctgttgcatagctgttggtacattaatgtcgtctccaccaatgccaataaataccggatgcgtgattttcagcgtcggataagaaagtgaagggagcgcattagtcagcagtgactggatattaggtgtcagactattgttcatattcaggcggttatgcatcacgttttgcgttaacggggtgatacagagggcttttgcctcatccaactgtgctaaggcagcgttctggaagtaattctccgccttcagcgtagggttagtatccgcagccgattgccatatataaaaaatatacggtattttaggatcgccagatgactgatttttatcatcacttttggtgaataagctggcaacatcgctctctgcagaaaaatagggggtgccagttagcacggtcccgatgatattcagctctggtgcgtaggtgggctgatagcctgctgcagcaaaggcggcgtgtgccccctgagactggccaaccagtaccagttcgtttttaagcggaaattcagtgagcgcagcacgtataccgtcaagcacgctccagccctcaccttgtgcgttaagatagtggtgcatcccgtctgagcctaatccgggatagtcaggagccacaaccgcgtaccccaaagaaagccatgtattaagatattggctgtctcgtgccgtgcgtgtattcagtgacggtgcgcagtccgagtttattcctactgtgccatgtgtccaaacgattaccggccaaccgccctctggctctgggccaaagggaataaacactgccgcactgtccgtacgctctcctttgccccgtacaccatccacagccgtatactcaatccggtactgactcttcgcctctaaaagcccatgcgcgggatccagtggcattttcgtcaccactgtccccgtctttgctattgcaatacttgtgacaggtaaaataagggtgaagactactaagctttggtttactaattttttaaggtacatagcttttccttgattttttataatgggcctggcgaataatcgggagcaattctgcaatctcagactaacgaatttcgataggcaccatgcaacatcattacctcgggcatgttgcaaatagcctccttaatacgctggaacatcgccaagcgcaccttaccacaatcattacaaatgaacctgcaacaggggatgcatgccggtcgcagattcaatccgtaatcttcgtgaaggattggtgtcagtatagtgatcgtcaacggttgaatgcgtgaagctgaaataggcagaaaaaacaggcatagggttaccgtgcctggtgctacgacgatgatctcttctaagaaaaaatactcatagaatgagtggttatgttgtgagtaatctttatgtcaatatcaagcgcagtcggttctacaaggtggagtttatgactttcttgtaaaatcagtaggttaatggaacaacttgaaacaatagatgctcatgtttaatcctggatatggattagctgttcttatgtatagttgttgtgcagctgaatttatgtgatcaaataatcataaccaaaaaatacctattggttatagttgctgtgtgtgattaattattttgaattaatacgttttgtttttttgtgataaaaattattataatcagttggttattttattttagtcattttattaagcaaaccttaaaaattttaatgttgttaaaaacaattttgatagtttttgtctatgttgttttttgtcttcaatcggtataaactatttctattctctcgaacaatgttttacttttctaatgttttatggggctaaatgctcttccctggcttgaagaagcaacctatttcctatagacaaaacgattttgcaataatgaatatcttcaggtctatgataaacaacacttttgttttcctgcgatggttttagctgcgagtgtttttctctgatcaagaaataactaaaaaattcagtatgttacctcgcttttcctctattcgttaattttatttattattattggtttgaacaaaatgatcgtatgaagtgtgagttgtttgagtgtcaggttttagcaaagaggatatttctaatacaaattaattgagtttttttatgtgatcagaaatgaaagttcggctttctttttttgattaatttaattttatgcaatcaatgcgagtaagaaaatgttggaatattgtgtgacgcagacaacttactttttaaatgaatcgtctgtttatcggcggatgaattattttttagttcgtttgtatgaagatcaaaaaaaggccatcagcgaaagaggtgttcaagataaatgccagatttaaatgatggaactctaaccgaagagagaaatatcagcgtggtcctgattaatcgttatcctctcgaatctatagccataaaatccattctggagaaaaaaggagtggccgttactggcgagacgataagcggtattgatgctcttagccttgttgaccaattgaggccaaatgcgattattatcgatgtcgatctgccagatattgacgggattgaactggtagagacgttccgtaagcgtcagtataaaggaagcatcattgtgacctcgaataaatacgagtatttttattcccgatgtgctgccaatgctggaggcaatggttttgtgagtaaaaaaggatcgatgaatgtaattccttccgctgttctggctgcgcaggatggttattcttattttccgttttcgcaacataatgcttccggggaggaaacgtttgccaggaataagctacaagccttatccgagcaggaaactatagtattgcgatatttactcgtgggggatagtaattcacatatagccaccaaaatggatataagctcgaaaactgtttctacttataaaagtcgtctgatgaaaaagctaaattgtcaaacgctggtggaacttattgggtttgccaatacatttaaaattgataacgcctatatttatgaatagctatgtgggaatcatatgcttatatttagtgattactccttagtggttagggttatatattgtgataagttcaccaataatatagcctggcggttgtgtttattgttcatggcgaaaagtgtcagccggtaatagcaatgactgcttgtatagaaaggtaatgcaatcgtatgccactaactgaaatgaatgccatgcaaattgctctttccggttatgctgagtaaaagataactgcataaggagcataggagtttcattttttaggatcgcagatgacaactcgctgtgacgagttgaaaggggattaaacagcggttgttatttagtgtaagcatagtgtagtttgaagtcgcgtatcataacgtctggctgccgattgatttctggtattcgagcagccactcgccaaacccgatgaatatatcctgtactgagagcgtaatctggcacttagagagataaagggtgatatgttttcttatccaacaaggtgaatgaagatggaatactaccgtccccacttcaacaatggtctggatattgtttaagggtggctgaagcgttcaccggtttcgaaccacaaggctatgaccgtttgtacgacaacatcttcatcataatgaatgcgatcgaaattccctcgatagtgaaaagcactcgttcctgagccaatgaaaatatatcgttgccgacggcaggattgaaggctaaagcaattgtggtcagacaaaatgaccagcggaagtaatttttggccccaaactgtaacattaacaggaacatcccgccaacaatggttaagtgaaacaaggggtaaggataacatgccaggattatgcttccggcaatggctcccagtattgttcccatgcttctggtatgtatgcgatatcgcgtttcctcccatgcaggtttaatcacccgcagcgaggctgcggggatccagcatgcatgtgccaatggaataagcgacacggccgcacttcctaacaacgcggtgagggtaatgcctaatagaaaccagcgttgtttcggtgacttcaatgggtaaaggggagtgagagctggtgagaggggctttttggggataaagagcagaataaagggaatagcccacaggcaacccagaccgaaggaaaaaatgtactgacttaacttttctgaggatgattgtccgtgcgccagaaaaaaaacaagagctgccagtgagaccggcaggcgtagattccctccacgaagttcagccatgccttgcgccagggcagccaggatggtgaacaggaaaaaataaattgagccgcttggggcactgagacccagcaccgcgaaaaagatcattattgcggccgcagtgaatacctgcaggagtgaattccgtgcaggcaatactgaaaaagaaatcatcatcatataggcaccaaaagaggcaatactcccggatcccggctcctgcataatgacacttatcatccatggaaagagcatggcaagtgtgagcgcaatgggtgatatttttaagttgattacaggtcgctgtattttatttatcactattttatctttttaattcaaaggaacaacgcgggggtgtttgtgttccacaaatagtccgcccgcagccagtgggatggcaaataccaatcgccgttgtatagggaaccagagtatccatttacatatatcccgtaaggataactaacctgtaaattgtttatagagctaccgattgcctttattttgtgaagataagtctatttctgctgaaaaaaatcagcggttatctttcctaatgcaatcaattgttgttcaagcaattgtatatcctgctcgatcagagaaagcggttgccctgttgccagcgcattttctaatttatctgcaagatggtgtaaagaaattgcgccgattaactgtgctgtaccattaagacgatgtaaatgatattgaacgatatcccgttcaccactggacattgcttttttaagcgccgccagatcgttgatattctcatggtatgcctgtttaattaattcaagcatgaatgctgtatcatccattgcgttatcccgtagtacccgcatatcgataagctcattaaaggctgtcgtatcatatggtgtgtttaatgacgccgatattccagaaagaattgatttttccagacgcttcgttatgttgttaaaagcggcagcgagttgcggcaaattaacgggtttaatcaggcatagatccataccgctggccaaacaacgtactttttcgtcaggttgagcattagctgttaaaccccaaataacgagtgtggggttaatctttcttacctgctgggtgagcgtaagcccatccattcccggcatattgagatccgttatcagcagatcgtactgtcgttgtttaatcaaactgaatgcctgttcaccatcttcggcatcatccacataatagccaagaatatctaactggcgacgcagtaatagccggttggtaggattatcatcagcaatgatgacccgtagccctgatgatacaggaagggtcatttcctgtttatttaaatctgtaggggctcgctcagaaacttgagtctgaacatatatgctcattgttgtgcccgtgccagggtggctggccactgaaatggcgccatgcatgcgatccatcagttccttacagatggttaacccgagaccagagcccatttgcttcttaccacagctggcctgactgaaaggtttgaacagcagttgctgttcttcttcgctgatccctacgccactatctttgacgctgagcatcagctgagctccatcattttcacgaggttgtgtttcgaccttaatttctacaccaccgctaaccgtaaatttgatcgcgttgcttaagaaattggcgagcacttgcttaatggcctgcggatccagccacagtatgcctccagcattcaattgataacttaccgttaaatgcaggtttttttggcgtgcaaggccagcaaaattggccatcgtggcttgggttaatgcctctatgtcaacccattccggtgtcagttcaaaattgccagattctattttttccatatccagcacatcgccgatcagtcctatcaacgattgcgccgtggcataagccagctgaagtgattcctgtgcttctcgttcactttgcggcccggttgccagtagttccagaaagcccataattgcgctgaccggagtacgtatttcatggctcattttggccaaaaatctactttttgcccggctagcctcaatggctttgtccttttcgacctgcagcgcttccataagtttgcgggattcagttatgtcctgccagccgcaaatcagcacgggtggtaatggcactggcagcgggcacaatgtcatccagtgcagaatggtacggtcttcggcaccgttgttgagtgtaaactgatgtgacgccaccgtatccggagccaatccttgctgcatttcctgctgaataatcggaaagatatgtacaagcgggcttcggcgatcaaaaagggaataatgtatagcctctctttgttgtggtgtaaaaaacgcgttgaaggcacggttgtaactttcaatttctccttccggcgtcgtaatatagacagggacaggtatcgaattcgataaggtctgacgtaagctcagctggtattccagcgctgcctgcgaggccttttcccgccgaatggcgcgcagtaaataaccaccccagagtaaactgctcaaaatgagcaataccgcgctaatcgtcaaaatataaaaaggacgactatagagatcccaggtatcgatttttacctcaggcatttttatccatttgcctgccaggtttagcatctccttaggtggaatttcggccaacgctttgttcaggatgctttgtagctcgggtttatcacgaggtacagcgaaagcgatctgtgcggaaggctgatcggggatccgttgatagctcatggtttctgggtagtaatgatcgatgatatatcgagccgccagttgggtggtcaccacgctatccactttaccaagattgagactactcagagcggtactggtattttcaacgacgacccaatggacgtcgggatacttctgaatcagcttttcccgtaaggaataataagcaggtatggcgatcgttgaaccggctttgaaaatatccttttgcttattttcattgctggtcaccacaacataaggtgttgaaaaaaaaggctgcgtaaaggccatttcatcttcacgttccgggctataggtcactgtaggtactatatcccagtcacctttacgcataatctctgccatatcactgttggattttgcgataacgggttgaaaatgcagcccggtctgtaattgaacaagattaagaatatcccctactaacccacgaatttcccggttttcatccagtacggtgaaaggcgcataataaggattgaccagagtcctgaggactgggtttttttctatccaacgcttttcttttggcgttaaagatagcggtttagttaaaaatgtgaggttaccatcatccacccatgtatgggagatcctggtatgtgtcgatgcatctaatgctgaaataaatttattgattatcgcgacgagcctggattgatcctctcgtgcgataaaataactacccgttaacggtgagcgccagtatttaacaacatctagattttgataaaaatcccgagctataagaaaattgctggcaatattatcaccaatgaaatactcattttctctgttagcaacagatgccaatgcctgataattactgtcataggagacaatattggcatgtctgaatattgatttaatgaagttttccgatggatgatgttggcttactgccacgttcaccgttttatcgagctggtaaaatggcataattccgttcgaattgcgtgtcactaatgccggataggtctggaataatagctggctgataataaacggggtggtgactggaacggaggtgttatctgaggtcagtaccagatcgacttcagcgttcttcagggcaccaagcgcctgagattcatcatcataatagtgaagcacaagattaacgtgcaaagcgtctttcagcaattgcaaataatctgcattgatccctcgataacagccgttaatactattcatggcaaaaggtggattttcttcgccatagacggcaatcgtcatggtacgtttatcggcaagccacgagagatcctcctgacttaatggaagcttagagataaagctgtgcgctttgctggtcagtttcagcgtgattggttcagtcgtagcggctgttgtttggccgatcagcaatatcatcgccagcgcaataataattcgagatatcatttttcaaccgatattgttaatgtttgaaaagacgaataaatctttaagtgtcttacaattgagctttaccataagacgtcttttataagtgcttactgttttttggttgatattcatctcaacagcaatattttgattttgtgcgccattaaggatgtgtctcattatcttaagttcctgttccgataatgaaagtattttattttcagcaggagtaaggttatgcgatggcaaaggaaagtaataataaccacgttgtacagcctgaatagcagcaacgatgttatccattgattcttttttactgataaaggcattggcgccggcatcgacactgcattttcggtaaaaaatttggttttttccggacaccatgacaatactgccagcgtagtgattttggcgaagttttgtcaccacatcgattccactcgacccaatcagaatggcatccacgataacgatatcgggttgcaaccgatcaaccagctggatggcatgaaaatcatctgcagcttcacccgttaccactatattttggttctccaggatggttcttagtgctaaacgtgcaaacggatgatcgtcaataatgactgcactcattttgggggtacttctgttcatttcgagatccttttgtaggtgatcgaagcaagtgttatcatggtacggcctgaattattgctttatatgattagccggatcctatgtaacttcctggtatgctactttttactgatgttattccctggtcggcgcaagggggtatgtgcgtttaccaactcactgttacttttcccaaaatagacaagcgcgactttcaacgcatacaaacaacgcggtagcgtagtaaacttcattaaccttgctgagcgcaagggcttgtatatcggaaatatttcagtgggggattagcattggtggtcataacttcgttatctcatccttttgaataaaccagatacatttagtgtgacttaagtcaaaattttaatttaaaaggctgacatatatactcatcattgaaattccccctggtgttggtcagtcaatgcgggctgtgtattgggtaaataacaaacttttattaaaggccgcacgatttcgtaaaaaatagaggcctcttatctaaaatgcaagcgcgaaagttttttttaagattgtggtgattttaatgtagggcgtttcctacacaagtagtattaatccggcaggcctaatgtcaggagtattaatgacttaaatttgtaaaagaaccttgggcgaaagaaaggttcatacaactgctgagacattggggcgttacttaaaggcttgagtgtagtattttgttagttgccgaggctgtatttattaaaaatgacacgatttgtgggcgtcatcctacgaatgtaggaaattactctcgatgaaataatctcgctctcatttattaatttaacttaatctttaagataggcattgtcagccacggtaggctgcgcaggaatttaattgtaatctttatttaatgaaggacttggctatgaaaaaaattatcaccctcgcacctgttgcattaatcctgggactggctagcaatgtacaagctgccactcaaggtgatgtaatgctgcgcggtaccattgttgatactacctgtgaaatcactgttaacaacggtgcggcagagctgaatgtgggttcttttggtaaaaccgcatttaacactgctaaaaagcaggttggtcaggagtcgctgcaggtttctctgactcagtgtgatgctgatgaacagggcggcctgcaggtaaccggtattgttggtgctgacagcgaaattttcatgagcaataccggcgaatctgctggctttatgctgactgcggaagatggtacgacgcagattaaaaacaacgaggctgtaccggttacggctgatgcagatggtaacctgacttataccttcaatgcaggtatgaccgtaatggatatcgctgatattgttccgggcgaatataacgcgccgatcaagatttcttacgttactaactaattaatttactctttgaaaagagagttcctctccgttctctcttttcatttttgggattgcaaatatcatgaaattatatcaaaaactaggcatgctttttaccttgggtatcttatgtgttcagcccgtgctggcagggataagcattggtacctcacggattatctttcatgagaaaaacagtagtcagagtgtcgacattaataacagttcaaccagccaaacctatcttattaatgtcggcatttcggatacgctcaatgccaaaaccgccaatactgcgtttcttccaacgccggcgctttttcgtatcgagcctgattccaggaataccgttcggatcctgaaaaaggcgtataacctgccaagcgaccgcgagtccttgttttattttaacgttatggctattccgacaggtaaagttggcgaggctgatgcggggaattctcttggcggtacccttcaggttgcaacgggtaacaccgtcaagcttttttatcgtccggataatttgcctatgacgcagaaggaagctatgggcaaattagaatttacacgtgctggcaattcagtaaaagtttttaacccgactccctattacatatcgctgaggaatctcgtggttaacggtcgttctgtcaaactcgatgtaattaaagggacgagcatgattgcccctttctctgcgaatacgtatccggtagctgcagggcagggaattacaaaatggactgcgattaatgattttggtgcaggagaaacatttaatggggtcattaaataaaagatacataccaggccttgcactcttatgtatcgctctggctgtgaatccagcccgggcggcaactacagagatcacggccgatattatcgacggaatttgtcatatctctttcagtactaccgaaattgtttttgcgacaaaaggctcccagcaatttgcgactggaacggcagaggtgcaaccacttgacgtgaatttgagttgctcgggtatgagcggcttagcgcccacgttcaaagtgagcggcgattcgtcaggcgttagcgaccaacggctttttaggtcggccagttcaacggctaattatgcaggctttatgttgaagcagggaaccgtcaccgatctgggcgatttctataacgcgcctaatacggtcgcccccggcgatgtgattgctatcgataaagatgatggtgattctgttcagcattttaccgtagggctggttcatggggcaggggatccgccgattggtaacgggacggttaacgccaaaatcaatttcgcctttgtctttccgtaacgctttcatggcataacacaatgaaaaaatattatggatttttaaagcatggtgttgtctcgagagtggcactttgcctgggtctgttgacattcgcgaccagcgccagggccgtggatattacctttaccgccacatttcaggcaccgacctgtgaagtttcagcccctgctactctggattttggatcggtagtttcctccgagattaaacaaggtctaagccaggaattatcgctggacgtcacgctttcacaatgttccggctttattgggacgactcaaaaacccggaattaaagtgaccggcgcgggttctgctgtgtcgggtgactttctgtttcgctcagcgacatctcagtcggtgaattatggcgttcttattaagaatgcatcaaaagcggtggtacaaaataacacttttttaccggcctctctgacgtcgacaaattttgatggtggcagcgacacgatcccactcaccgccacgctctcctgtggcactaaatgtaatgacgcaaccaccaggcctggttccctgaatgccagcgttacctttacttttgcttatcagtaaggagtgcttaagtgcatcaacttttccgtctcttgcagcgcactcttctggtgagtggattattgatagctgctgttcagcacgtatatgccgctgatggtgggatcagtcttagccgtacgcgcattatttttacctctgcggataaagcacaaacgctgtctatgaaaaataatgggccgcgcccttatctggttcagtcagcgattatcaccgcaccggatagccgtgagcttgcgccgtttattagtacaccaccgctgttccggcttgaagccgacagccagagcgcaattcgtattttacgccgtggtgatgcggcattaccggccgatcgtgaatccgttttctattttaccgctattgctgtaccggcgaccgataaaccgaatcagggacatgacgcaacaatgtctgcgcgtctttcagtcggcatacaaaatactatcaagctattttatcgccctgtcggactggctatgactgcggaagaagcgggcggcaaattaacctttcagcagcagaacggaaaaattcaggtaaataaccccactccctattacctgacgttttcgcgactggcttttgatggcacggatgtgaatgtgcgtgaaggcgtatcaatgattgcgcctttttcgcaggcgacatatccggcgaagggaatggtacgccaggctcagtggtccgtcattaatgattacggcggtagcagcaagttgtatcagtctgctgtgcagggaggcagaaattaatgcgtttacctctgacgtcagccgtattgattgctgcattgtcctgtacgccatcctgctttgctgtggcaccggagtcgtccggtatttcgctgagtcagttccggattatctatccgggcgcggacaccaaaggcgttacctggtcgctgacgaataacaccgaccgtgcctggctgatccagtcctggatacgtccggtggactttactaccggcctgccgatgcctgaaacagagagtagtgcttccagcgccaaaatcccttttctggtgacaccgccgttaaagcgagtggacgctggggaagggatgacattgcgtattcgcctcacggaattgtccctgccgaaagatcgtgaatccgtgttttacctgtcggtaaaagcaatcccggcggtaaccgatagcgacagcgctagtaacgggaagctggtggtggccgtagtgaacaatatcaagctgttttatcgccctgaagggttacctgcggggggagtaaagaaagccgccgcgcagctgcgattcagccgccagggagagagcctggtggtcgataacccgacgccattttacatcaatttcagccaggtcacggtgggaggcaagccgatctcagcggatggcttgcgcaagctggttcctccttatggtcaacaacgttatgaccttgtcaagggtatgagcgggccggtggagtggcaggtgctggatgaggaacaccgtcccacaccgcttcagcaccaggctctgtaacaccatgaagaaccgtccgttaacgccagataaaaagcaggcaacgattgtgattaaaaaaaagacatcccggaaaggaagcaacgccagggttgccaggattgacactttcccactgaaaacgatctctctctgtgtcttcatgagctgcaacagcgcgtgggcgacggactattttgatccagagttgcttgcgcttggtacaggaaccagcgatgtcgacctttctgcctttgctaatcccggaggcgtggtggaaggcgattacctggtcaatatctttattaaccagcgtatggcgatgtcgcgtacgatccctttccgtaagaacgcgcagggtaaagtggtcgcagagctgacgcctgcattgctcaatgatttgggggtgaatgttgaccatttaccggcctttaaagatttgccgaaagataaaccggtgaaggatcttgccgaactcatcccccagtcatcggtcaagcttgatattgcgcgtctgcgtctggatatcagcattccgcaggtggcaatgcagccgggcaaaaatagccgtatggaccctgaactgtgggacgacggaataccggcattactgttcaactacagcctgagcgccggacgtaccgaacagaatatcaataacgactctcgccatatgaataacctatttgccaacgtacaaaccggggcgaatttgggagcatggcgtcttcgcagcaccatcacccacaactattcagatcaaaatggtgggcgtaacggccagagcagacataccgatgatacgcgtttttctaatacgtatctgatgcgtgatattcgcgcatggcgatcgcatttaactatcggtgaatccagtaccggcagcgaagttctggatggtgtaccattccggggcgtgcagctccagtccagtgagcagatgctgcctgctcgtttacgtggatttgcgccacaaattaccgggattgcgaacagcaatgcccgtgtcaccatccgccagaatggctatgtggtgtacgaaacctatgtcgcacccggtccgtttgaaattaaggacctttatcaggcaggaatgtcgggcgacctggaggtcacgatcaccgaagcggacggcagtgttcgcagctttgtggtgccctattcaaccctgccggtgatgttacgccctggcacgttcaaatatgaagttactgccggtcgttacgatggcgggctcacctatggttcgcgtcaggaaaattttgtcctcggcaccctaatctatgggttaccaaaaaacattacgctgtatggcggtggtctggtatcggaatattacaccgcattatccctgggaagcggggtctcgctgggggactggggcgcggtgtctgcggacgcgacgttatccaccgccaaatttcatggtgaatcccgtgaaacgggaggatcgtggcgtttgcgttactcaaaaagtctccttagcaccgggacgtcaatcgatctgacggcgctgcgctattcaacgaagaacttttatacctttagcgaatacaacacgatgggttatgcgagacgcgatgaagatattttttatacgccggatcgtcgccgcagtagttttcagactcaggtttctcagcaactgggggagctgggatccatcagccttcgtgcgcatcgcgatgaatactggggctccactaagacgctgactggtttatctgccgggtacaacggtggctttaaaggagtgagttatgggctttattacaccatcgatcgcatgaaaggtaacgggagttggccagagaatcgccaggttacattcagcctgaacataccttttagtattttcagctattcgccagcgctgcaaaacgtctatgccacatctcagatttcgcatgataacaccgggcgcactctgaatcaggccggtatttccggcagtaacgggaatttttcttatagcatgatgcagaactggggcaatcaaaatcaggccagtaacagcaaccttaatatgggctggcagggaagcaaaggcagcattaacgcgggctatggctactcccatgatacgcgttcaatgaacatgaatattaccggaggggcaattgcgcactctgaaggcctgacgctgtcgcgaacgcttggaagttcaatggcgctggtcagtgcaccggaagcaagcggcgtccgtcttaccagcggcaatggcgtaaccgattggcagggttttgccgttgcgccttacctttccgattataccagcaacaacatcggcctcgatcccagcaccctgccggataatgtggacctgccgaaaaccaacgttgaagtttacccgacgaaaggcgcagtggtgaaagccgatttcgctacccgtatcggttaccaggtattaatgaccctgacgcgcgtgggcgggatgggcgttgtgccctttggtgcgacggtttcgctgttgaataacaaggagcgtgatgatgcgaccagcatcgtgggggataacggccaggtgtatatggctggtctgccggtgaaaggggaattgtccgtggtgtggggtaaaggcgccgataagcagtgtcgggtgaattttaatcttaacggccttaagccaacggcacaaatgccggtaattcaaatgaatggcgattgccgttaatgaaaatgctttatgtcctggcctcaggcagcagcgcagcaagagagatcgatatgaataaaatgaaaagtgttatctgttttctggcactgggtgctatcagcccgcacgcctgggctacgccaaataatgatgacattaaagcgatgctttcccaggcaaagagcggggacgcctctgcccaaacccaacttggcattctttatgctgaaggcagtggtgtcacccgtgattataaaaaagcgcggtcgtggttcgaacaggccggtaaacaaaattatgccgatgcggaatataatctcggcgtgatgtacggcaatggggatggtgtggcgcgtgatagtaaaaaagcgcttacctggtttgaaaaagcggcagagcatggccatatcggcgcccgttataatctgggcatgatctacggccagggaattgggactgccaaagacctggttcgtgcggctttctggtttgagcttgccgggcaagatggttcgcctgaagacaaatacacgcttggcgtgatgtacagcaagggtgaaccgctggagaagaatgatgtaaaagcccggcaatggtttgaacgcgcagccaatgaggggcatgtgcttgcccaatataatttagcggtcatgtacagcgaaggactagggggcgatcgcgatctggagaagtctcgttactgggcggataaagccgccgggcagggtgatccagaggccgccagattgctcagcgtattgaatgaacgaggcaaacagagtcccttcgagatactgatggtggcgagcagtaaccctgctgccgcgccgcatattgtgccaccggttcggctcggatctcacaatgaggatgaacaaactgatactaaatcgggtgacatgccggatgagacgccggttgttgctgttatgagtgagcaaagagggatttcagtggaggataaagctggcaaggatcacgtcagtgttgcgacagatgtaacgtctgaaactgcagtagcaacggaggaagatgttaaaccaacgccggagacagttgaacccgaagctaacgtaaaaagcgtcatcgatacggacgtggcgagtgaagtagcatcaccggacgcactgataatcaacggcacgaagaggattgaagctgacacgctttatagcgaacaggctacgacagcgtcaccgtcatcggatattgaggctgcagatatgaccactaagaatgagattttgacaaccccaacatctcagagcaacgaaagacccagaactgaggatattaatgaaagtgctcagacagaggaagataccgcaccggttgagcatgatgtgactataaagatgcacgagccagccgtaaaagaagaaagctttgtgaagcagacgaataaacagtagtttttcttagttgaaaggatgtaaattagtggggctactgataaaataatggattcaatagggagtgtttttatttacattgcttttctatggtatggggtattcttgcgttgaggatatcaatgccagtgaaccagggtgagtatgtcaatgcactatagattataaagcatcactttcaaaatttattattgtagtgtttgctaaaggtgacttgatatttaggtgaaatggccggtgtatgctaaataatctatttattttcgtggtgggattattatgtctgaactcaataaagttgctataactaaacgtattgttcacatatcgactttagataagccagtcgagattaaatgttgcaataagtaccataatttttgttctaaatatcgtcttttccgaaatataggcagatctgaagtgagaataccacggtattatactaagttgctaaaatgggctttttatgtattaactatatatgggggggcaggagtatcaacgagttctgcggtgaacctgtcttccggttatcagataatccagacaccctcagttaccaacatttcttccagcgttatccctgagccaggtaattactctcgtaatccgccaaccggatgggcttggaatatccaggcatttatgaatgaaaatctttcatcaggactgctaggaagcatatatgcttcggccgcgagcagtcctgatcgttactgtaataacacattaccttatttaacgatcgatggttatacgggttatgaggtttcgccgggagttctgcttattccatatggatctattcgtaccccctttcgcttatctgcagctactcacagtggtacttctcaaatgtattatcaggcgttggttcccaatacgatggcgacgggcatagcaaatggttcatgggatcaaaagggaataatatccggagatgctgtatcttcagccgccagggggagttgtaagtcttttattaaagggaataatcctattaataataatgactggcaagcaattaactatgattatggcacagcgcaatttaatatgggctatggtgtttatgttagtccgacagcggctccttttcagaaaacggtttatatacatcaaacgtattttggtttgctgactaatggaatgaatagcgctgtaaccagaagttttgacctgaacctcccttctgttaattgtactttgaatgttccggcagtagtcgattttggaagtgttacgtcagatgccgaaactgctgcaaaaggcatcagtcaacaatccacttttgctgttaactgcagcagcacaggaggcttgccagtatcaacgactgttggatactcattcacacctaaaagtcaaaaaggggataaaacgagtatacctttaatagccaaatctggcggtgcggctgttggaagcgtacgtggcttcctgggagagaatgcaggctccgaagcaggttgcgtcaacaaaaacacttctattttgatggatggaacacctaaacctctgcggaccattaccaataattcttcttggtccgagccgttattctgggtgctttgtccgaaatccgatgcaaatccgggtttagcatcagctactgcaacacttgagctttactggcaataaaagcgtcatccaggggagttgtaattacacaggatagtcaagtttttttcactgatacgaaagctttcagaggagcattcaaaaaaggcatcactctgatttggggggattaaatatgtcattaaccagtggcggtgaggtcgcagttgaaccagataaagttcttgagggagcaatttaagctggtaaaactcatccagataattattggggaaatagagttgcgtgcattatttttccctagggactattgatatttttgcatattgaagatcggggcgacagcggacgctttcatcccgaaaaagtgaccacttattggtggtcactattttcttgcaatacgacttcgatagcgcccggtcacaggggaggcccgcacctctgtatccgggcgcttcatatgagccccttcttttcttctgccatataacctcctgtctatgatgctgcatatagcctggatttcgcgcccgtaatgcatcaagcaagtctacataatgggtgatgcttctgataattgataaacatcgataaaaggcacgatctggccatgcataggagagggcgctggcaggtgatctgcccgcgccttcagtcagcgtggctgtttcagcgacgaacccgctgagacacaaggataagtaagatccctatggcgagcggcagcgttaaaagttgcgaaagcaaggaaatcgcatagccataaatataattttcaaggcttatggcaatgattggaaacactaaaaacaccagtgaggcctggaaagcgcctgattttttttgcagcaaaaagtagcacaggatgccgaaaaccccaccaatcactcccagatacagcgtggacagcacagagggcaatgagaatgtggatacctgaggatgttccagaaaatatccagcagcggtaaggatgagaccggcaaaaaagcagggaagggcattaaaagtgagcactgaaacggtgcaacatcttttcttactctgggtgtagatcaccgcgtggatgagcacggcagctaccagcgccacaattccctgccactggctaccggcatttgactttgcctcatgaagaataatgccagacaaagagataagcgcgataagcaggcccaagatttgtaataactttggtttttcgtgtagaaagaaaatggatgcgatcagtaccgcgactggcatggttgaaaatattacggaggcgaggcctgaactcacgtacgtttcaccataaatcatcagagtgaacggtatcgcaaaataaaaaatacacaccacaccctgaaatatacgttgcttttctggaaaaactaaaggggttttggtaagcagcgcaatggaaattaaaaacggggaggcaaatataaaccgcatgcccgtggcgaatatgggagaaatggtttccacggcgactctcatggcaagccaggtggtaccccaggttaaacaaaccagggtgaacagcaggaatattgtcacgttacgcatataatcatcctaaaaataatcactggcctggcgatccttccctgacgcttccatgaagttttcgatgtcggggaaccttgccagtgatggcgtttaccatgcttgtgtgcagagggttcacaagctgtgcgggaaataaatgcttagactgtttcagtttggataaaggttattacgggaaggaattatcccagtgtttgtgctctgcggttaacgcattcatcctggttttattgaggatggacggttattatttaatatcaagcctaaacgattaataaatggcgcggtagaatgatgagaatatcgagagggtttgtctgtctatgccacctttgctttattttacacttggtgtttaaattgtttatgtactattaagattataaatattattattgcttgcagcctgtgccaacagatacggctccatttaatggtgaataacactattattacgctgtgctgattttgaccttcataaaatcagctggtctgtcggctgcatgcttatcataacctgtctgctatttcataccatttattgtgcaactggctatcgcctgtctttgccagtaaatgatggagggctcaggttgtcaacgtacggtcttgtaaattaaataacgtgatggagatgaataaatgaaagttaaatcattggtttttagtgccatcggcgcactgtttttaacctctgccgcccatgcagctgaccacaagaagccggttaattcctggacctgtgaagattttctggcggtaaatgaagattttcagcctacggcagtgggggttgcggaagcgctgaattctaaagacaaaccggaggatgcggttctcaacgtttctgggattgaaaaagtcaccccgacaatcgttcaggcttgccagaaggacaagaaaatgtctttcaaagataaagttcgtgctgaatgggataatctgaaaaaggaaatctattaatcccaggggaatgccacaatcccttattccgcaataatgttaggagtagcagagccgcgttataacgtggctctgtttttttgcgactaagtaaatacttcatcgatttcgctttcgcatccgcgttaagcgactcgtccctgcagatcatacccgcaactatccgctaagtcgctgtgcttaacgcgaggctatcatcatgcgtgagcttatttgctccagaagcgctgtctgatgactaaatataatgatgcttaacccgcgccgacgggattcatggattaactgctgccagatatcccgttgcacagaaggatcgagctgggcggtgatctcatcggcaatcagtacgcgagtacggggatcgagcgaccgcagcagcgcaatacgggccagttcccccccggacagctgagcaggttttcgcctcaaccactcggggttaacgtgaaaacgcgccagttgttcatcatccggctgccacgcatcgcgtaaggcatttcccgtggtgcgaaaagggttaaatgtgcgttcagggtgctgaggcactaactgaaccggacaataaccacgttttggcaaaggaaggccgtcaagggtgatccgcccctggcggcaggactgccagcccgcaagcacgcgtcccagcatggttttaccatagccgctcggtgccgaaattcccaaccgctcacccgccggcaattcaaaagagaaattttgccacagcgggcgattatcttgctcaatggtgagctctgaaacagaaaacattacacgcccccggcctggacaggcatttcctcatcggaaaataagcgttggtgttctggcagggccaaccactgacgtcgcaatgctgcgcttccaccgccgtctttgagttcgttaacgaccatatcatcactgatctgtccgtgactgagggccacaatgcgatcggcgaaacgtgccgccagcgacaaatcatgggttacccatagcaccccggccccctgagccaccagatcgcgtaactgatgtaggagctggaaagccagcggttcatcaagccatgccgtaatttcatccgccagaatataccgggctcctcctaatgcggcattacatgccagaatgcgttttgccatgccgcctgacagctggcggggatatttcagcagaatatcgtgctgaagatgataatgtttgatttgctgttctagcgccagtgcgcaggtatgacgaccactgaggtgcaggcttcgcttcagctgagtgcctacggtcagaagggggttgagcgaaccgacgccctgcggaatatagcaaagtgtgttaccccgaagcgttgcgcaatggcgggaatctatcgctttgccctccagtctgatttccccacgcatccgtaagttctcgggtaagagtgccagagccgtttgcagcaggaggctttttccttccccgcttccccctaccagagccgtcatttcgccgcgcttgactgacagattaatattgctaaggagaggcgataactgttggcgtccaaaccaggtgtaatgtacatggtcgacgtagatgctactgaaattcagcatgatggattccttaaccacagatcgcgaatggcgcgcacgcagagatcaaacagtaaaacaattaacagcagcatcaggccgggatacagcgccagccaccagctaccgttgctaaagaaacgcagcgcatcggctaataaaatccccagggaaggatcatgaggcgccagtccgaaaccaagaaaacttaatgctgcgctgtgtaagacagcatgtgggaacatcagtaatgttcccacaagccactgtgatgaaagcgcgggcagataatgcgcccgccagcagtaccagcgagtatttccaatacgctgagccagcgtcatgtagtcgctggtccgaatctgctgggcttctgctcgcaggatcagcgccagtttgggccagtgggtgaacgcgacggctaaaaccacgccccgcattcctcctcctaccgtaaagcagattaggataagcagcagcagatggggtaatgagagcagggtatcaatgatcaatcgtagcgcctgatccatcacgggatggataagcgtcagactggcgatcagcatcgcaataacaccgctgcagattgcggcaccgacaccaatttgcaaactggtcaatgccccctgaaagcaacgtaaccacagatcgcgccccatattatcggtgccaaaccagtggctggcgccgggcggaagatagcgtgcctgcagatctatcggtacatccactgacaacaatgaaacgccataggcagccatcatgccgagcagtaaggatgaaaaaataaaacgcagtaatgccggagcgggattattctgcatcatttcggctccagaatatgatttgttctggccagtaacatcgcagcgaagctatttccgcaaaataccagcacggtactgaacagcacgatgcccatcagcaacggaatatcgccgcgcaggccagcatcaatggtggcttgccccagtccggggtaggcaaacactttttctgccagaagcgagcctccgaggagttcgccaactgaggcaaactgcaggcaaagcgcgggggttaatgcatggcggagtacctgtacccgtaatagcccccagcctttctcgccctgggctcgcgcgtagtgtacaaagtcactgcgcatcgtttcggccactttttcccgagtgtgcagtgcaatttgtccaatgccggtcaggcttaacgcaaccatcggcaagatgacatggtgaaggcgctcccccaggctggcattgtcggcgttctgacccggtgcccaggcacagcaaaccggaaaccattgccagtgaacggcaaatatcgccagcagtaataagcccacccaaaacgtcggtagtgaggacaacaggtggctgatgcggcagattaagcgatccggccagcggtggagataacgtccggcagtcaatcccagcatgatccctaacaaccctgacagcagccaggcgctggctaacaggataaatgagagggcaaagcgttcgccaataacctgggcaaccggggcgttataaatcattgaatatccgagatcgccctggatgacttgcgaaaaccaatgccagaagcgtagccacagcggttggtccagtccccagcgtgcggcaatgagggggtactgttgggggggaacatgcagcaaatcattgccgatataggcacgaatgggatcaaccggtgaaaaactcagcaatgtaaaggttccggccgataccagtatcagcagaatggcgagcctgaagacagcaatcaaaacaggacctggcccgtaagatcgggttagatttagcctggtcattaaaaaatgctttactggcacgtccatttccagtcctgaacattgttaagcactgaccagctgccatgaatttcaggagcagcattacctaaatcaatacacggactggcaaggtaggtatgttgtaaatttagcagccaggcccaggcggcatcgccccgcacgcccgcgccagactctccatcccattcaacctgctgccagacaggaaccgcttgttgccacgttggcgcgttgagcgcctgctggagatgctggtccacggcgttattgctgtaataacccggattgtaatactcaacgcccgccgccttgctgctgtaatgatggtaaagctccatcggatctagactcccccagccgaacagcgtgggattggcatgcatatgccgctcgacggtttcccaactgccggatttgagctccatcgcgataccgaggggtttcaccatcgcgctgacggcctgagccaaatcgcgacgggtgctgtctccgctggcataccacagcgttaactgtgcctttttaccgtttttaacacgaatgccatcctctccgacctcccagccggcatcatcgagaatgtgtttcgctgtggcgagatcaccatctttgaaggcggcctggggattgtcccagggtaagccctgcaccgcgctataagcaggtactgcgtgaccttccataagctggtttgccagaaggtgacgatcgatggcgtagttgatggcccgccggatagcgacatccgcagtaacgtcattaccgatcgggtatccgttagcatctttttgaccggcaggtatggtggggaaagcgatgccccggttttccacgcttgggcgtacccatagtgttaagccctgttgcggcgtaaccgaaacggatggtgcgactctgactaatcctaactgaccactttgcgccgcagcgtaggcgctgtcttcatccagaaagacaaagatcagtttatcgaagtcgtttcggtggcctgaataataaggattagcctcaacgataagctgctgcccgggctgaaagctcaccagccgatacggccctgcgccgaccggattttgcgcataggtttttgcatcatattgatgttgaggcacaatccccagcgatcctaatacgctgacaaacgtgctttgcggtgcggacagggtaatctcgacccgacggtcgtccagaaccctggcggcggaaaaattccccatatcgattttgccgccaccctgcgcggcctggttataggtaaaggccacatcctgggccgttaagggcgagccatctgagaatttcaaatccggcaggagcgtaatggtccagatctttccgtcggcactgtgctcgacgtgttcagtaagaaaattctcccagtccatatcgacattttgttttaacagcgcgctatgcaacagcaacgtgcttccatggctccagcccagtaaaggatcaaagccttcactgggctcttcaccaatagccaatgtcagtgagtgacctgaggttgagtccgtttcagcctgcgcataaaacggtaacgtgctggcgataagcgcaaaagtatatgacattacttttagtaggtgaggcatgcggcttccttgtaacaatgcatagtcaataaaaaatgccctgacgcctggtatgcaactctgctttttcagcaatatcgataatgggcgccggtcacatctacctagtgaccctgacgatgggccggcataatgtctttattcggcaccagaaagagccaggaagcgagaacaaagggcatggtcagcgttgggatgcctaccggcgccagcaatgtgttcatggctccctgcacgaaaacggtaaatatcacgccgataaaggtgtaacccaaaactcgccagctgggtttattgaaacttgagccaagcgcaatggccgtgagcaccgcgctaaatgcatataacccgctgtcggtgctggtggtattcgctccaagcagtgaggcagttaataccgcgagcagcgaaccgccgatggcaaatatcgccgcccaacgtgacgccaccgccagacccacaacaaataatccccccgcggccacgctgctgaataaatacacctcagaaacaccgtgtaataccgtggcaaatatgtggccgttgaacagcccccccgccggagcactaactaacgggtgggggagttcaggtacggataacccggaggcatccaggcctgaaaacgcataacttgccagcaacacaacccacgtcgtcagcacaaagggagccgttaatgccgctactttccaggttttcagtatgtcggcaatactgacggtggcgataacagacacgatgctgcctgtaataatgcagccccaaagctgcggcgtgacggataaaaaggtcggcagcgccaccccaaccagacaaccattgtatccgtatagtccggccagccatgaggtgcgatcgttaacgaacataccggtaaatgtcgcaaccaccgtacccagcacacagccataggccgctgcgggattgccttcgccgtaagcggcaataaatatggcaataaagaagattaacccggtcagcgggttattctgaaacatgacctgagcacatccccgcagcgtcacgtcgataaacctgacagcagggtttatttcagtgtaatgagtccatttactcgctatagctgatgaggtattcatgatgtggcgtctcctgctaattatttttcattctgagcttgtctgacggaagagggccgttaaggcccttttcctgaaggcaacacgctgatgtaaaggtcagactttccagagaaagggcgccggcaatgaataaccggtggcaacttgccgcacggtttgccagaaatcccggatggctttttttatacgggtgctgtcgtttgccagtaccttataaataagcccagccccattgggtaaacggcttacgccatgacacagctcctcgctataaaaagagcgtgaacgggacaaaatttcgtcctggcaggttgaaggggtcaacacaattacgttgccgtaaatatcgaatgttcccattacgccgacgacatccagcggcttttctttaggggtaagtaccagtttttcagtgaacaaaacgtcaccggcttcatttttggcactgatccgcgaggaataaacatcaaaaccaaaacgctcatcctggtgatgatgcttacgccctggcatcaggatttccgaataaagcacggtggcggtgctgtcgcattcaataagggtatcgctgataaatcgcgaatgacgatgcggaatgacctgatccggcataaattcaagataagcctgcttaccgacgcgtatatgttgcgtttgcgcggcaaaattattatccatcgaatggattttagtcgctgactgcgtggtgatatgggcgcaggcgcccgcatcaacctcaatctccaccgttaagcgatccccctgcaaaacgcatcctgaggtggagatcatgggtacgcagggcaggaatggcatttcctcatcccagtagagggctttttgaaccagcaatggcacctttctttccatttcatggagggtgcttttggcgccacgatcggcaaaacgtagccgcaaatagccatgtttgccgacggcgccgctggccatttgcggtggctcttgttgatactttgccagttcgggcgccaacgcgcccagagaaagagtatcgaacgccggcgacgccttgtgtttggtctgcatgatggctcctattttgcgtgcgtaaacaggaaatctttttcgatcatgtccaccagggcatcgatgccttcgccagttttacagttcgttaatatataaggacggttgccgcgcacaattttggtatcatcctccatgactgcaaggctcgctccaacgtaaggggcgaggtcgattttattaataatcaaaatatccgcctgcaccaggccgggcccatttttacgggggattttttccccttcggccacatcgataacgtaaatataaaaatcagccagcgccggactaaaggtcagcgttaaattatcgccaccgctctcaatcataatgaggtcgctgtccgggtacttatcttccatttcctcaaccgcagcgatattcatacttggatcttcgcgtactgcggtatggggacaggctccggtttcaacgcccataatccgctcttcatcaagaatgcctttcagggtgcgttttacctgtttggcatcttcggttgtgaccacatcattggtaatgattaacggcttataaccacgctcgattaatttaggggtgatgacttcaatgatggctgttttacctgaaccaaccgggccgccgatacccaggcgagtaatttttttcattctccagtccttatttttaattcataaataaacgcacatgcgcatcaacgtgtacggcggccagaatatcgataagcggcgtgtacgacgccatttcgctgatatcggcattcacggcctgccggcaaaattcaggtatgtttttatttacggcatacagaatctgctggctgtcaaagtgcgttatcctcatcagtcgctgggcggcgctcaggatagtcatggcaacgccatactgatgcatagcgatggtttcctgagcgctgatcccttgtaaccccatgaccagcgcctggcttaccggaaatgtgcctgctgtctgtccggttttaatgttatccagccaccacgtcagcaggtcggcttcgaacacctgacgggtcatctcaaccagtttcttacccatccgctgcgtcattaaccgcgactcttcattgagtttgcgattcataatttcgcgatcaacggccagaagctgatctaagttgccatcaagtaatgcccggtgagcatgggccaggccaatcgcatcgcattgcgctgcctggaccagcgaggtttcaacaaacgcttttaagctcacgacatcgtggaccaatcccacctgaatagcggattccacaccacatgaaaaagtaaatgctcccactggcagaaccgagtcgccgaactgcaatactctgatcagacgcaggagctgatgtgattcatcaatgtttatgctcatgcgcattcccatgatgtgcgtggtgagatcgatcgtgggcgtggccgtgctgtggatcgccgctgagtacgctgacatggacatgcgggtcttccgcaccgccaaacagcaggcgggactcggacggtgtcaggtgtggtaataccgtttcacccgcgacaaagtgatattcagattgcgcgtaaccatgagttttcaacacggaattcatcattttcttttcgactgataaagggacatatacctgagtgcctttgatcaccgacttccagtgttgatttcccagggcgtgtccgagttcaaacacgcgtttaattgcgccttcgaactctgccgtggccagggaggcgagctggataaccagcacttcccgcagagtgatatgtacggttaacaggtattttttgtcgtcatcacataacaaaatatccccgtcggttaaccgcatgcgacgatccagagcgataccgatatcaaaaccctgctcgctttgcttacggcaacggcttttttgagcttcccattgttccagggacagcacatcgtgttgatatccgcgggtcttttcctgccacgacgggtcgttttttacatttccgataatcgtctcaatcagtatcatgtttatttgcctcacatcagaacgcacggatatggcgcttagccaaagaaatatttttggttcattaccgctgttgtgacggggttgcaggtggcatgttcaccatccactttcacggcgaaagtttccggatcaacttcgatatgcggcgtggcggagttacgtaccaaatcacgcttggttactgagcggcaattgttgatagcgataacctgacgctcaaggccggctttctctttgacaccatcatccagcgcggcttgagacacgaaagtcgcgcaggtgtcttgcagggttttccccatggcaccaaacatcgggcgatagaataccggctgcggggtcggcagcgatgcgtttggatcgcccatcaaggcccagttgatcatgccgcccttgatcaccatcttcggcttcgcaccgaaagagcgcgggtcccataaaaccagatcggccatcttgcccacttcaactgagccgatgatatggcttacgccatgcgcaatagccggattgatggtcagcttggcaacgtagcgcaatacccggaagttatcgttgccgtcgctgtcttctggcagtttcccgcgggagactttcatggcatgggctgtctgcacaacgcgcagccagttttctccgacgcgtcccatcgcctgagagtcgctcgaaaacatcgagattacgcccatgtcatgcagcacgttttccgccgcgatagtttccggacggacgcggctttcagcgaaggaaacgtccgcagccacgtttgggttcaggttgtgacacaccatgatcatgtcgaacagttcagcctgggtgttgatgccgaatggaagggtagggttagtggagctgggcagcacgtttaactggctggccaccttgatgatatccggtgcgtgcccaccgccggccccctcggtatggaaggtatgaatagtacggccttcaaacgcctcgatagtgttttcgacgtaacccgcttcgttaaggctatcggtatgcaccgatacctgaatatccatttcgtcagcaatacgcagggaatgacgtaacgcgtttggcgtggctccccagtcttcatgcactttcaggcccgccaccccggcaataatctgttcaaccagcggagcacgcccaaacgcgttacccttacccaacagtccgacgttgaccggtagcccctccactgcgcgcagcatcttgcgaatattccaggggcctggggtgacggttgttccgttggttccgtccgtcgggccgatcccaccgccaaagaaagtagccacgccattcgatagggcgctgtacgcctgctgcggtgaaataagatggatatggctgtcgatgccggccgcggtcaggatcaagtgttccccggaaatggcgtcagtgctgagcccgacaatcatattctgcgtcacgccatccataatggccgggttaccgcttttaccaatgccaacaatcaggccatctttaataccgacgtcggccttaatgacgcccagtttggcatcgagaatcgtgacgttggtaatcaccaggtccagaacgccgttatcgcgcgttaaggtattattcgatcccattccatcacgcagtgatttaccgccaccatagaccgattcgtcaccatagccgcggaggtctttctcaatttcgatataaaggtcggtctcacccaggcggattttatctccgaccgtcgggccaaacaggctggcatattcttttcttgaaatagttggcataaaatcctcactagacagttaattctgaaatttaacttactgatttaaaaccatgtttgatggcattgttaagaatatcttcaggtgcatcgccctgaatgccagaggcgttgccgacccagccgtcgaccagattattaaagccgtataccacctgctgaccgctgaaaggaattaattcaacggtaatagcatcacccggttcaaatcgtatcgctgtcgtagcggtaatgttgagtcgtttaccaaacgctttactgcgctcaaactccagtgctttattggcttcaaagaaatgaaagtgcgagcctacctggattggacgatcgcccgtgtttttgacatgaacggtagtaatggagcggccttcattaaaagtaattggcgagtccgctaatacatagccgccgatggggacccctgtctccacctttttaaccatggtttccgaagtgttggattgctttttcattagagctcctttgcagagtcatttcaggcttattcactgaatcgggtcatgaaccgtgaccagacgactgccatcggtgaaaatggcttcgacctggacgtgaggaattaaatcagccacaccgtccatgacgtcctctttggttaatacggtacgtgcttcattcatcaccacttccagggtttttccttcccgggcaccctccatcgccgtggtcgtaataatggcaaccgcttccgggtggttcagttttagacccttgtttttgcgcttcaacgcgacgtcagccagggtataaaccatcagcttttcaatttctctgggcgtgagttgcatatttcctccattcctgattacacacattgtttaatatcggtgatgctgccccagccacagggatggggcagagagatattaatttttctcgctataggcatcttcgccgaataaagtgttatcgagttcgccgccaactttattctggtcgactttaactacggtgaatttattaatgagccacagaatagccagtgtgaaaataaacgaccagacgctggtaaataccacggcggtaatctgtttaatgatttgcatcccattgccttccagcagaccgtcaggcccattcgcgttccatgtggctgaggcaaagacacccaccagaatcgaacctgttatcccgccaacgccgtgaacgccaaacacgtccagcgcatcatcaaggtagcggcgtaccaacagcaccacgaaataacagacgaagctggcaataatgccaattagcgcggcagactgaatcgagacatagccagcagctggggtgatagtggcaagcccggctactgcgccggttaaaaaaccgaccagtttgggtttgcctgtacggattttctcaatgacaaaccaggtgacggcagcaaaagcggcggcgatatccgtggtcacaaacgcggagaccgtaacagtattgacctgcagttctgaacctgcgttaaaaccataccagccaaaccacaataaaccggctcccagggcaatataaggaatattatgcgtaccgtctgaggccaccgtacgtttgccaacatacagtgctgaagccagtgcggcaaaacccgctgtggcatggaccacgatcccgccagcaaaatctacgactccccatttcgccagcattccctccggactccagatcatatgaacaaacgggcagtaaaccagaagtgtccagaaggtaaggaagaccagatacgccggaaaattgacgcgattcgcaaacgcacccgttattaatgcgggggtaatgatggcaaacatcatttgatagacaaaatgtactaataaggggatgccacctttgttaccggtgtacatcgtccctggatcaatattattcatgaaagaataatagaggggatcgccgatgatcccgttgagcgtcggaccaaagctcagtgaataaccgacaataaaccaaagggcggcgacccaccccatcgagaaaaagctttgcgccattatcgtcacaatactttttctgggtaccagtccgccataaaaaaatgccagcccgggcgtcatcaacatcacgaggctggcgcagagcaacataaaagcagtgttaggtacatctaatgataaataatttacaagtgcatgttccataaaattatccctgtgatcttatacagcgcctgtaagcgttgattttttaagctggcgaacgcagattgcacgatatgacagtgcgatatgtaaaatatatatgcaggacattgtttatattcgtaaaataaatcctccacgcatcgagggagtggttttattaacctgttaatatgcttttaatcgttcacgcttttctccatggcaggctgtgtgctgattttcctaaaggaggccagacatgctaacaacctcttataaatgcatgccttgcattcgataaaataggtctcctgacttttgtaaagttatatacttcaagagtgtatagcttgttttataatctgtatatcagagtggatacccgcatgagtcatacccatcctactggtgtaagttgttgcctgacggaataaaatattggcttatttctgtcagggtagctgccggagaaattatatctcaggacggaataagaaggcaggcacgtaaaaaagcgaaaaacagcaatctgtaagataggctgttttccgctggtggtttatcagctatggcagaaaagaataaactgcgcaggattatcgaatatcattcacccattgcataattttactttctggtttttcatgacagattttgattaactttggtaccgagacggtatccgtttcattccagtcaacggtgtctccacctttatagacggtttcattattgattgcccagtaagctaccggggtcattgccttagggttcatatcaaggtattcccggcaagtcatgttttgcggtgtggtttccgacgctttctccgccgccacggcggcgttggcgttcagtaaaacaagagtcacaacgggtgtgagaaacagagtggataattttttcatgatgttttcctgtttaaaaagcctataaaccatatataaaatagcgatttatgtggtaattaattttttttgtgctttattcagtgcatagctgagcactaagaagaatccggcacagaacagcatttccagcccaataaaggtgacagtgatgatatagctggcgtcttcgctagcgcggagccaggccagggcgatgatgaggtctattatgccaatgaaaatacaccaataacgacccttcatagcccgatctttaaatcccatggcgatgcgactatacccggcaaggataaataaaacacaaaacagcaatgacaaagtattaatgccgaatgacgtgctaaagataaaaccacagccgatgccaaaataaataattccaaataataacgatgagatgtaagaacgagtattatatttaatgaatatcaatgccatcgccacagagtacatgccacagatgaacattaaagcaccagtcagggtgctaatgaccacaccgctatatattgggaagagcatacaggccagcgcgcacaacagcagtataacggccataacggcagtagctctgcggtatctttttaccagcgtactgccgagagtatttattttactgctgtcaataaataacatgatttctccgttagtcattacggtagcaaaatgaaccgcagcagatagtaggcgacggcatttaatagtatttcagttattataagtggcggttattttcgtggatatcggagtgcgagtcgatcgatatcatcaatatcttacaggtgtaggatgcaatggtgggggagctttaatttttctcaacggagtcgttggcgccgctttttcttttatggatgggaaggcgggacggcaacggttatagtatgtaatttgtataaactggctggacatgatgtgaaattaacaggcttgtagcgagtgggaaacaggagggggattatcaggcccgttgccgggcctgatagataacaagcattatccagctttgctggagttaaacggtggttttgcgaaccataccagcagagtgagcatcaggaatacgccagccgacaggtaaaaaacatcgttggccgccattagcaggctttgctgagtaatttggtcatcaagataggtggctatttgctgcttatcaaaacccatatgttgcagtttatggaacatatcgacagacggaggattatactctgtcactgattctgttaactgcgcgtggtggaaggagtcgcgacgactccatagcgtcatggtgatcgtggtgccaatagagccggacaaacttcggaaaaaattactcagactggtggcggcagcgaatttctccggcggtaaccctgaaagtgaaatggtggtcagcggtaaaaagaaacaggcgaccgcaaaaccctgcataaattgtgggataataacccacgtaaaatcaatggccgagctaaaggtgacggaacgccagtaataacacagggcgtacatgataaaactaaacgttaccaacatccgcatatcgattttattgccatagcgaccaataagcggcgcaagcagtagcggcatgataccgatcggtgcgtaagccagtccggccgataccgaagtgtactcaaaaacggtctgcagtaactgcggcattaacacgatcgccccggcataaattaaataggcacaggcgatacataaaataccaatagtaaaatttcgcgaacggaacaggctaagatcaataatcgggttattatccgttgcttcccagatgaccagtaaaataatagcaacaacggcaataatcgccagaacaatgacagtggttgagttaaaccagtcgagatcttttcctttatccagcataatttgcaggctgccgacgcccagcaccaggaggctcagcgcgatgagattaattttaaccggttcagttggcgtctcgcgccctttgagtaaccaggaggtcagcgcaaccacaatgacacccagtgggacgttgattaaaaatatccagccccagtcgtaattatcgcaaatgtagccaccaataatgggcccaaaaatgggagcgataataactgtcattgaccaaagcgccagtgcaatattgcgtttttccggtggataattgcgtagcagcagactttgtgagagtggaatgagcggaccagccaccagaccctgaacaacacggaatcctatcagagtgtccagatttgtcgaaagtccacagcataatgatgccagtgcaaagagggttaccgaggttaaaaatagtttgcgttcgccaaaacgttgcgccagacgaccggtaacagggatagaaatagcattcgccacaccgaacgaagttataacccaggtaccttcatcggttgaggcgcctaaaaatcctgagattgtcggaattgccacgttggaaatggtggagtccagcatttgcataaaggtggccatcgacagcgctaatgtcaccagtactaaggcagcacccttcagcggcggaagtgcagtattattactcataaatcacatcgcgttggctttgatgatattgaggatttcgttatcaacaggggtggtatcgataaccagtgcgttgcttgcgtaagccggggtttttcgctgcgttgttgccagtgcttcgccctgcgaacgggtttcatgcagccgcacggtggtggataaaccgatgcgcaacgggtaggcctttatctgctcggcatccagcgtaatgcgtactggcaggcgttgaaccactttgatccagttaccggttgcattctgcgcgggtaataccgaaaatgcgctaccggtgcccatgttgataccatcaacctggccgttaaacaccacatcgctgccgtaaaaatcggtgacgatcgagactttctgaccgatctttacccctttgagctgtgtttctttgaagttagcgttaatccagacctgctcggctggtacgattgacatcagcgcctggcctgagccgatagtttccccgacttgtacattgcgttgggcgaggtaacccgtgaccgggctgcgcactttggttcgctgaagcgcaacccaggcttcccgcatggattccgctgccattaacacttccggctgtttttctaacgccgtattctgaatcagtacacggtttccgcgataagcctgaacagcaacatccagcgctgctttgctgctgtccacggcatcctttgcatgttgcatattctcccttgatatcgccgctgcgccctgcagcctgctacggcgttggtagtctgccagtgcctgctgatatgcgattttggcttcctgaacgttagcgttatattgatcgtcagcaatatacatctgtttgatcttgcggaccgtattggccagattattggcggctttgttaaaattaattctggcgtcggtatcatctaatgtgacgagaatatcaccctgacgcactaaatccgtgtcggtgtaattaatactaattacgcttcccgcaaccagcgaagagacggcaatttgattccctttcacataggcgtcatcagtgctctgcacatttcgtaaatcaaaataccaccaggctgtgctggaaccagcagcaataaccatgatagccgcgaaaataagcaacattttttttcttttttgaatttgcttgccggtaatgttttcgtcagtatgtaagttgttcatgatgaaacttattccatatgtctgtatgcaagagaaatttatgtgcaggaagcgctgcgtttgatagatgctatgaggaaaatgggcgtattgaaatgttatttccttatgcatataaccacttggttaatgatttttagcccagcgggaatgacatagcatcactatgcatagcggtggtaaatgtagtcccggttaaacaagtgtaaaattatgcctggaacagtcacattggatgtatcggaaatatttgcaggttaattcttacagatgtaatccctgcagaaggtaagtgaaagaaaacggcattatcaggttgcaacgacaaaactttcaatgcctatctaggatgaggacgatgaaggatgctattgtagataatggatgaataatacgattcccggtcttccggctacgtttgcatatcgtcgatcaggcatgtctggttggatagaaggagagcacagcatgtcattacgttcaacataacaaggaataatgatgagtaaaacggcaaatttaagcgcgattattattgatgatcatcctcttgcgcgaatggcgatccgtaacctgctggaaagtgagggttttaacattgttgccgaagcgggagatgggggcgaagcgttaacggctgtagccgaacatcagccggatgtggtgatcgtggatgtggatatacctgtcataagcggtatagaagtcgttgaaaaactgcgtaagaagcaatttagccagattatcattgtggtttcggcgaaaaacgatctcttttatggcaagcgtagtgcagatgccggcgctaatgccttcatcagtaaaaaagaggggataaacaatatcatctctgccgtccatgctgcgcaaaatggatacagctattttccattttcgctgagtggctttgtcggcagcttatctaatgagcaggcgatgctgcagtcgctctccagccaggaagtcaaggtgatgcgcgccatcctgaatggggcagacaatatgaaaatcgcttcagagatgcatatcagcaataaaacggtcagtacctataaaggtcgattgatggagaagctgggttgtaaatcgctggtggatctcttctcatttgcaaaccgtaataaaatcggataatgcgatataccggtgaagggcatatccagcgttactgtgggggatgttagcgtgtcccccgtctttataaatcaaagccgtcagcaacggctggcgcaaaaacgaatgtcaggtatcgtcattgtaggtgcaaagttttcacagttaagcatacatgagtcctctgaacgcgatcgcggattctaaatcgattatttattattgatggaaagagtattgtgcctgcctgttatactgataaatgtcgcgggcagagccgcctgcgaacgatgccttcatgttcccgtgtagggcaataaaatggcaatgcattctcaataaggcatcggatgatatccccgctaacagagagactgaaccctacgggaaagtggaccaacatgcctgaagtgactatcgatacctggagcttctatagccgacccttttactggtttgcagggctggcgacgctattgatcctgagtggtttgctctggggcgtgcattggctgcgatctgagcgcaaacgaaaagcggttcaggcggcgctggagcatcagctcagttttcaccagacgttgttcaacgcgatgccgataccggtgtatgtgattacccttaagggcgagcttgacagttataacaacgccttcagcgcttttttccccgagcatctgcgtgaagcgatgcatttttcactgttcgaccggcgtcatcctctcgcgcatatcttccctgcgatccagcatgaggttcagctgggcctgacccccgatatcattatcacgcatccactggcattacataatggtatagaggaacgaacgattttgcactggatggtgttatgccgcttacccacaaccctgacaccggtcttaatgtgtggctggcaggatatcactgagtcccgacagttagtggagaagcttcagaatgaaaaagaacaggtcaaagacgccagtcaggagagcagtgcctctttgccctgctcgagtcatgatgttcgtacgtcagtaagtgctatcctggggtttcttgaacttatcttcacccgccaacaaacagcagaagaagatcagcagtgccttaaactggcgtatgccaccgctcagtctttgcttggtttgaacgttgataccctgcctgggaacgttaaggcagttccgcaggcaattcgtattctcattgccgaggatctccccgccaaccgccagctgcttcgccgccagctcgataccttgggctacgctgctgatgaagcgaaggatggcgccgaggcgcttaaactcatccagcaacagcgctatgacctgttaattaccgatctgaatatgcctgtgatggacggtattacgttaacctgtcgcgtgcgcgagtacgataccagaatggtcatctgggggcttaccgctaacctcgtggccggagaaaaagagcgttgcctggccagtggcatgaacttgtgcctgtttaagcccctggatctttctcagctggccaccgcgctgtgtgaaataaatataccccagcccggcagctcgcttgatgaattcctcgatatgaagatattcaccgcgctgacgctgggtgataaaaaattaatgcggcagatgctcgagcaatcgcgggtggaaaacgaaaaggatatcgccgcagcgcgcgcggccatcagtggacaagactggcgactggcgcaataccatttacaccgaattaatggtactgcacagattcttggcgcaaccgctatccatgcgacagctgaacagttagagaatgcgctggcggcgggggaacctgaagccgttttgccgcagggaatagatgaacttacgcagcagttgcaggcattaagcgcggcgataatctttttttccagtcaggcggactaccattgatagtgccgctttcaccggatcgctcctgattgctctgctgcgcggcgcaacaggagaaaaagtcagttcgacttaaccagtcgatctgttatgagtcatgggcggcgcaggctttactcgggagcccagtcttaaccccagctccacagccataaaaccgactatcaggctgataaccagataacagatggcgatcagcgcgctgagtggctcattcatcatttccaccgcgccagatacaaagctggagaaggttgatagccctcccatgatacccgtagccaccatcatatggatgtactgattaacccggttccttttatacagtgatgtgcataaaccaagcaaaaaagcggcaataatattggcgatgaagatatccaggggaaagccatcgctcaggcgaggcactaccaacatcaataattcgcggcatattgcgccaaacgccccgccaacaaagatcagaatagtaaaattaagcacctgatgcgctccttatggacaggctaaccatgcaccgcaggcagccgccgccacgccggtaaccacagagacgattaaatatcctgcagcgagtaacctctggtgcgcatgagccaggttggcggcatctaactgcatgctgctgaaggtggtataaccgccaaggataccggtcagcaggcctgcatttaaccattcaccatagcgctcgcgccagtcgataccgaacagcgcgctgagatatccgatgattaatgcgccgctcacattgattaaaaacgtgccgagaggaaaatgtccgcggtaaagtttgctgacggcaagaccaacccaccagcgtagtaaagagccggtgccgccgcccaggcccacccaaaaaatgtcagtagcgaccatatttataccttttaaaatggcatcatcccgagaatcatcggtgggtatctcttaacgtttgcccgggagtaaccctgtcgtattggcgtaagcctgtattgagataaaatttggatctttccctacgttgatcccatcaaagttgctgctgcctggccccgacattcacggctatcctgcgttttagtcacgagggatcccagttaccaggttttgtataacccggctcgagaacaaataccgataccgattgaggtatcattgccagaaacactgccccgttaagccatgttgcaaaacgcgctcctgacctgtttttttgcttagggataaaccgtggacaggaggcatgacatgctgcattttttgaccacgagagcgcggcggattcgcttttttcataggcgctgagagagcaatgtttgaagattaagtctggcataaaaacaccttttggtaaaagaacaggaaacacatgtatcagtaaatttctgctgataataatcaggtatgataagcaatgattcgcttttgataataagtatttttctaccagtattaatgtaagctgaagactagcagagagggaaatagatgagaaatcgttcttgccgttataaaaaccatccttgaataggtgaaagctatcttgtcatcgttatcaatcgcttaaaggaactgtggtagtctatactctaaaggcgccttccgtaacactttgataataatggttgttttttttgtttgtttataggcttgggtgatttttttagttcaagaaaatgctatgaaaagtctcctgaaatactacacccccctaatttcatcaaaaaaattattttgctttggacttgccagatatatgtaggattatagtgggcctggtgaaggtgggggatgacggatgtaggattttcccggatgtaaataaataccgatcaaattaaatgatgcgacaatatctgcggttgatatcacctcgagtaagatttcactgcctgtcattcaatgggaaataggccgtgcgaggtctggatcaagttagagagattacgtgatgaattgcatccaataccataaaaaggaagcagtgaggggcgtcaagcttcatgctctcggataattttctcagctttgctgaacagatatgggcgaaatcaaatttcccattgccagggcgtcttcgcgttggttaattatggtttagccgaaagtggtttcctgtgtctcgtcggacaaaggcggctccatcgtgtttggtatattgccagaggcctgcgtcatttcccccatgacaaaagcgagattcgctgcggcgatcagcgcggaggtgtaggcgtcgacattcctttgctctgcgctcagcagaccgtttgccgcttcattagcggcggtaatggtgcccacaccatgacggtaagtctcaaaggcagtatcttcagtcatcatggcggtactggccagatggggagccgcccggtgtggttcaaacgcagagcgcagtttgttggccgaaactatgctctctctttatccactatgcggtatatcgctgatacacatcaaccatcagcggcggggtatcgcagtcggtgttatgtacggccagtctcacgctttctgttattttcttcgtaccaggaaatgaaatcagctgccggcatcggtctggcataaagatacccctggacgtaagacacccggttatctttgagccactctgcctgctgttgcgtactgacgccttccgcaatcgtggcgaggcccagacgcttgctaaggccaatgatggtatccaatactggcgtatccgtcccggcggaggtcagcgtatcaataaaaattttatcgattttcaggtagtccacgggcaggttgtgaagcagactcaatgagcagtatcctgtcccgaaatcatccacggctacctgacagccatgctgacgaagtgcgttcagattctctgaggccaatgcggtgtcatcgaccaggctgcgttcggtgacttccagtaccaggcgaaatgaggcagcgagggattgacgaaactgcagcacgtccgtggtaaaggcgtcatccgtcagatgggccgcagcgatattgacccccagatggaaaggggcggtcacctgccaggctttgacatcggcagcgatcaggccaaaaagatgtcgcgtcaggctgataatcatctcctcttcttccgctgcctggataaacagcgctggcgatattgagctgccgtcagcccgctgccagcgcatcagggcctccgcaccggtgcacataccggacgccgcctcacataccggttggtaatgaacaacaaactctcctcgcgccattcccttcgctatttcatcagccagagacaattttcctgtcagccagcgtcgccataaatacagcgtagccagcgtcaggagtagagaggccgggccgagaaaaatcatattgcgcaccaggtagcgagcaagcgattgccagggggtgatgatctgtatacgcgcctgactaaagtcagaattgaataccgcactgaagcccgcgaggtcttcagtgcctttatcctgactggagataacgggaccgtcactaaaccgcaaccgcaggatggcatgattttcatcatccagggtttccatcagatcggtaaaatatcgtccatctactacgctgaaaaccgtgatgccattaccggcaccagaggcgtagatgatagccgtctgatgcggaacgctgcgggtaccgttaatcgccgttatttcgagactgcccatctctgctgagagggggagtccataaactgaccgaatactttgctgtctggagccggtgatggaggaacaaacaagcgtgtccccacgcaccagaccggtactacggatgtaaggggtgagcgcaccggtttcggtcatcttttcaacaacgttttcgcagggctgattcgccatttgcgctgtcgtgtggagggtatggcgagcaatcgacgtcacgtggtcaacctggcctaacagaatctccgccgttatggcggtatccctttgcaactgacgaacggccatccccaacgatagcaggccaaccagaatcgccggaacgagaaggctgacaacaatcatccttttactcagctgcatcatggtgatcatctctgttaataattagccagacgcacttcagttggtgcactggcaaaaaggtccgtgttgtttttattcccgaatttatccgccggttatgccgcagtgagagcgtgaatttcctcagcgctaaggcagatttaaatgccgacagatgctgttacctaactcagtctgctcgatcccggtggaaggcacgattctcatcagaggaagctcgggataacattctattatccgttgctcgatgaggctgtttgcccaactgcactgggcaatcgcattctcatagtttgaaaaccctggtttgttgtctagcccacattcggatgcggatacacctagccctgcagattcaatatgcaggaaatgtctcaatgagggggcctggctcatacgatcgacaaacctgagcatcccctccacataccctgtccaaataaacggattattaccggatgaggtgatatgcgcacaattgatgacgtcagtaatggcattgagacgacaatcttcaagaaaaaaatccggtgccgtcaggtctcctagcaggatattgccactggatattctgttaattaacgtttcagcgagttgaaattttctgaggttctcattgacacgcatcacagcatgttttgtcgattcacctcttgtcagtaatagcagttggcattcggatttttctttcaagatataactcaatgcggcaccacctaaaaaaccggttgcgcctgtaataagtacgttccgcattttttcactatcattttcagggttattggccagactaaacggatgactctcaatgcttcttcaatatagcagtaattcttgtggtctggggtgaagtatttagtgttaccgttttttggtggagttgcgtttacaacaacaggcaggagtatttaggaattttcggacgcggagttgttatttctgaaatatttcagcgatgaaggtaaatgaagcaaataaataaaggacagcttccctgtcctttattcttttttattcagttttgctctcgcgcgatcgtaatacctcaccgaccaccggggcggcggtaaacgcatttggccatcccgcgtagaacgccgcctgggcgaccacttctccggcctcttcagccgaaagcccattatccatagctctgtttaggtggtagccaatctgcgcgctctgtccggcggcgattaacgcgctgaccgtcaccagacttctgtcgcggggcgtaagcgcgggccgttgccagaggtcgagaaacagcgggtcggcggtaaatttaaccaggccaggcgaaatggggccgacatttttttccacggtgtctgcacgctgtttctctacctgttcattgagtggcagcagcgttggcgaggcggcgggcagggcctctgccgtcacgcccctggcttcaaagatggttttagcgacgctgacggctgacatcgcattgggccagccagcgtagaaggcgaggtgagtaatgatctctgacacttccgctggcgtcacgccgctatcgagcgcaacggcaatatagtgcttcagctcgcctggctggttgcgggcaatcagcatcgctacggtcacgatgctacggtcgcgggcggacagggcgtcacgttgccagaggtcgttgctgatggcctcgcggccgaagcgcgccagcgccggggagaccgcttgaatatcagcgtccgcaagggtggaaggggtaattttcatcatagcttcatctctttgttcgtgggcataagcaaaatcagacagcacaagcgacaaggctgccgcggcaatcacgtttttcatgttttattctccctgctgaacaggacagagggttaccgcgtccacacctgaggatggtctttggcttgcggcgtgttttgcgccatcacgcctgtgagaacgtgcggctggtaggcttcttccagataacggatgtcttccgggctcagttgaagggctacagcgttgaccgcgccgtcaacatgatgcttttgcgtggcgccgatcaccggggcggtgactttagtcagcagccaggccagcgaaatttcggtcatcgagacctgatgccgttcggcaagttcggcgacgcgggcaataatgatccggtcctgctctgccgtgccgtcgtatttgccccgggcataatcatcttccaccgctcgccgcgtgtggccttctaagcgggagagacggccgctggccagcgcgctatagggagtcatggcgataccctcttccgcgcacagcccgaacagctctcgttcatcttcacgcataatcaggttgtagtggctctgcacagaaacaaaggatgtcagcccttcgcgttcggcaagggcgttcgccttcgccagctgccaggcatagcaattggaaatgccaatcgcgcgcaccttgccggcggtcactgcggtgtgcagcgcctccagcacgtcgataaccggggtgttgtaatcccagatgtggtagatgtagaggtcgatgtagtccatcccgaggtttcgcagactctggtcaagcgagcgggttatagcctgttttccgctgatcccctcggcaatctgcgcggcggttcgtggcagaaacttggtggccagcaccacctcctcgcgttttgccatctcccgcagcgcccggccaacgtaccgttcgctggagccgttctgataggcgatggcggtatcgtaaaaattgatgccctgttccagagcgtggcggatgatgtcccggctggctgtttcgtccagcgtccagcgatgctgacccgttgacggattgccaaaccccatacatcccatgcagatacgggagaccagtaagtcactcttcccgagccgggtatactgcatcgttattttctccctttgggttattccaccagagtattaagccgcgcgatcagtctggccgcgtgttcccgggcaagcgttttttgctgagcgattttgtcggcatcccggtcggcgtagctaataccgcaggtataaaccggcgccagcagcgcaagattgcacagcctggccgtggtctcgaagggaaggagatactcctcaacggcatggccaaagaaaccgtcagcggtatagagcgcctgtggcgctcccgtggtgaaggagaggatcagctttttaccacccagtttcgccgttgagccatgggcgaagccgtggacaaatacctcgtccagccactgtttcattaacccgggcagcccataccagctaaagggaaactgccagacaatcacatccgcctgcagcaggctttcctgctcagcggcgatgttgaatttgccgtccggatagagccagtccagacgacggatttccgcatcaggcagggcggtcgccagctcatcgaggatggtggcgttggcgatggaatggttaagatccggatgcccggaaacgacaagaatatgagccattcccaacgttactcctgatgtttaaattcagcggagaagagattttcccagctaataaacgagccgagtggaatacactcgaaggttaatagacccgcttttgccagcggaaattcggccatgacattattcgcctcttccacggtgtcgcactcgaggaaaatagcgacgccgggtcgatcctgacggaaatagatgtcgcgaataaagcctgacttgtacagtccccaggcatgcagggcttctgcggtaaggtgcggcgcatagtgttccagcgtcgcgccgggggcagggatatccagacataaaattcgcatagttgtctccggaaagtcgttgtcagcgggaagagacaaaagtatacgagccgcagggggggaagattaggcggtcattgacttaagaatatttagcctgtacttaataatcaggcgagggtgtcgtaaggagatgctatgaataacgcgctttataatcagatacgcatctttcagagcattgcgcgcgagggcaatatctcggccgccgcgcgcaagctcgaaatcacgccgccgtcggtcagcaatgcgctcaggctgctggaggagcatattggccaccccctttttgtgcgcactacccggcgtatcgagctgacggaaaccgggcaacagctgctggagcagaccgccgcggcggtggagacactggaaaagtcgctggaaatcatccgcgaccagaatcaggagccctccggggcagtgagaataaccctctcgcgctttgcctacctgcttattctcaaaccggcgatggcggcattttgtcagcaatatccggggatccagctggaaatatcggtctatgacggtaccgtcaatattattgaagaacgtttcgaccttgggatccgctttggcgatattctcgaaggcggcgtggtcgcccgcccgttaatgaagccgtttcgtgaagggctatacgcctcctctgcctatcttgccgaatatggcgtgcccgcgatgcctgccgatctccatcatcaccggctgattggctatcgctttattaccaacaaccgcatcctgccgctgagcctcaatgaccacggcgagcagctcaccgtcgagatgcccggacagttaatcagcaatgatattgacgtcatggccgacggtattcgccacggactggggattggccgtttatttgaaccaatcctgcaattacagcccgatcgtgagcagtttattcccgtgatggaggactactggaaaacctatccgccggtttatctctattacccaaaaaacgcgggcagaacgaaaagggtgaaagccctgattgatttcctgataatgcatgccgcggatgatgcagagaaagtcgggtcttcccgctagcgttcagctcagatcgtgcagcgctttgtccagcggtggggaaagctgaatatcctgaaacgcaaccgccagtccgccacgctccggtgagcagcacatgacgcccgctttcaccgggcctggcggaaagtagccgagccgcagcagcggccagcgctcgccgtcggttgaatactgcagccttaacgcgtcgcccttgcgggtcagccgcagccagaaggtgcgcgggtcgccggggaaaagcccggtggcccagtcggagtgggttagcgtcagtacgctgccgatggccggggcatcgtcattaaactcaattcccgccttcagccaggtctgctcgtcggccatcatcatcagcccagcctggtcgtaaagcgtggtgaaatccgcacagatttttgcctgcagggtaaaatcgcccgccacttctgcggcatagagatggccagagaagcgctcgaagccataccaggtatggcgccagaagtcggtatgcttattagtgaccaccgtcaggccgtcggaatcgcggcgccactcggcaggttcattgatccagtgaaagtacggctgcatttttcctccgggatatgctttcagacagggttataacagcgactgcagcgcgggtgacgccatgctggcctcaaagggaataatctctgtacgggcgagacccagctgctggaagggatcctggctcagacgcgcttgcagagtttcccggctatcgcattttgccagaatgacgccgccggtgcggggaatacggcggccggaggcgagaaagaggccgtcggcatagccttttttgagccattcgatgtgggcggggatcgcacggtcaacctcttcgagcggttttatatacgttaaaacaaccacataaatcgtactcatcctgaaagccctggcaatccaatgggatctccagcctgacatatttcgatgatggataaaagaaaacgcggcatttttccgtgctatttagcagggatggcggggcgcaacatcccggatgctcatcgcagacgtgaattaatatatatgtttttgcgcatgtatattgatctttctttgtggccccgtatgctgtccgtcacgcttgaggagaaatcatgtctttattgcccctgcaactgttcaaaaacctcgccgatgaaactcggctggggatcgtattgctgctcaaggcgcgtggagagctgtgcgtgtgcgatctctgtacggcgctcgcccagtcccagcccaagatctcccgccatctggcgatgctccgtgagagcggattgctgctggatcgtaaacagggtaagtgggtccattaccgcctctctccgcagatgccggcctgggcggcgcaggtgattgagcaggcctggctcagtcagcaggaggatgtgcggctgatgatcagcagactggctggcgggccgggttgccggtaaaaaatttatcttaacatatatgatttttcgaatgtgattggcggaggaacgatgttgctggcaggtacgatttttatcctgaccctggtgctggtgatctggcagccgcgggggttagggatcggctggagcgcgacatttggcgcggcgctggcgctggccaccggtggcgtacaggtagccgatatcccggtggtatggcatatcgtctggaatgcgaccgccacctttatcgccgttatcattatcagcctgctgcttgatgagtctggctttttcgaatgggccgcgctgcatgtttcccgctggggaagaggccggggtcgtctgctgtttacctggattatcctgctcggcgcggctgtggcggcgctgtttgccaacgatggggcggcgctgatcctcacgccaatcgtgattgccatgctgcgagcgctggggttcagcaagggaacgatgctggcctttgtcatggccgccggatttattgccgataccgccagcctgccgctggtggtgtcgaatctggtgaatatcgtttcggcagatttctttgccatcggcttcagggagtacgcttcggtgatggtgctggtcgatctcgcggcgatcctcaccaccctggcgatgctgcacctgttctttcgcaaggatatcccgccggcctgggatatggcgttactgaaagcgccggccacggcaataaaagatccagcgacgttccgcaccggctggggcgtgctgctgctgttgctggctggctttttcatccttgaaccgctggggatcccggtcagcgccatcgcggcgctcggcgccgggatcctgtttgctgtcgcgaagcacgggcgggtaattaacaccggcaaggtgctgcgcggcgccccgtggcagatagtgatcttctcgctgggaatgtatctggtggtgtatggtctgcgaaacgccgggttaacggactatctgaccacggtgctgaacatgctggcggagcgcggcctctgggccgcgacgctgggcactggtgttctgtcggccttcctctcttcgattatgaataatatgcccagcgtactggtcggcgccctgtcgattgatggcagcgcggcaacagggacgatcaaagaggccatgatttatgccaacgtcatcggctgcgatctggggcccaagatcacgccaattggtagcctggccacgctgctgtggctgcatgtgctggcgcagaagcacatcaccatcggttgggggtattatttccgctgcggcatcaccatgaccctgccggtgctgcttgtgacgctggccgcgctggcgctgcgtctctccttcaaccagccatgagaacgtactatgagcatcaccatttaccataaccctgactgcggcacctcgcgtaatacgctggcgctgatccgtaacagcggcgccgagcccaccattatctattatctggagacgccgccgtcgggtgatgagctgcgccagctgctcgccgcgatgaggatcccggtgcgcgcgctgctgcggaaaaacgtcgaaccctacgacgcgctgggcctggcggaagaccggtttactgacgaccagataatcgactttatgcttcagcatccgatcctgattaaccgtccgatcgtaacgacgccgcagggcacccgactctgccgcccgtcagaggtggtgctggagatcctgacggcgccgcaacaaggcgcattcgtgaaggaggacggtgagccagtcattgatgccgcagggcagcgtgtgaaatagcgcgcagaatggcgccggctgtagcagccggcatgccgtgttaatcctgctgtatggtaggctctccaggtatgtagcgcctggattgctgacaatattctcgcttagcgctatttctccactatccagtctgtttcccttacttttcctgccgttatacaccgcctctgcgccggtggtttatgtctctcgataaattattaactgtttgtttttaatgggtaaaatttcgttttgtgcgtaatgatataaagtcaacgtcgtttgcattattgcgaacattaaatctgtaaaactagatgtttgtcgacttttcatctaaaaagggaaggtaaggggctggacaaaaccattgcgtggttatcaaatggttaaaaatgctcgtgtttgatgttaatacaaacaaattataaatcgtcagcctgctttatacggttaacttgcgctgcggcgcaccttacctggagaatttatgcattcctctgttaataaaaacgaaagccgtacctttttcggccatccttatccgctgggctccctgttcttcactgaaatgtgggagcgcttctcgttttacggcatccgtcctttactgatcctgtttatggcggcgacagtgtacgacggcggcatgggcctggcgcgagagaacgcctcggcgatcgttgggatttttgccggcagtatgtatctggccgcgctgcctggcggctggctggcggataactggcttggccaacaacgcgccgtctggtacggctctatcctgatcgccctggggcacctgtcgatcgctctgtcagcatggctgggcaacgatctgttctttatcggtctgatgtttatcgtcctgggttccgggttgtttaaaacctgtatctcggtgatggtcggcaccctgtataaaaagggcgacgcgcgccgcgacggtggtttttcgctgttctacatggggatcaacatcggctcgtttatcgcgccattgatctctggctggcttatcaaatcgcatggctggcactggggcttcggcatcggggggatcgggatgctggtggcgctgatcattttccgtgtctttgccgtaccgtcgatgaagcgctatgacgcggaggttggcctcgattccacctggaacagcccggtggcgaaaaagaatggcgttggagcgtggctgctggcgctggctctgggagtggcggtgctggtcacgcttatcagcctgggcacgatcgtgattaacccggtggcggtggccagcgtgctggtctatgtaattgccgcctccgtggcgctctatttcatctggctgttcgtcttcgccggactcaaccgtaaagagcgggcgcgcctgctggtgtgctttattttgctggtctcggcggcctttttctggtccgcgtttgaacagaaaccgacctccttcaacctgtttgctaacgactataccaaccggatgatcggcgattttgagatccccgcggtctggttccagtcgattaacgccttgtttatcattctcctcgcgccggtattcagctgggcgtggcctgcgctggcgcgtaaaaacgttcgtccgggcagtatgaccaaattcgtgattggcatcctgtgcgcagcggcgggctttggcctgatgatgctggcggcgcagaacgttctgagcaacggcggggccggtgtgtcgccgctgtggctggtgggcagcatcctgatgctgacgctcggtgaactgtgcctcagcccgattgggctggcgaccatgactctgctggcgccggagagaatgcgcggccagatgatggggctgtggttctgcgccagcgcgctgggtaacctggcggcgggcctgatcggcggtcatgtgaaggccgatcagctgtcgctgctgccggacctcttcgcccgctgctccatcgcattgctgatctgcgccgccgtgctggccgtgctgattgtcccggtccgccggatgctggagaacagtcggtccagcgccgcgcaaaaatccctcagcaacgcctgacgcgatcctcaggccggccctacgggccggcttgttttttgtccaatccccgccccagcagaacaaaatccccttttcacaatgcgcgatgtcccataacgtgagcgtgttctttgaaatcacgtcgctttccggtccatagtgtagtcaggtttactatgtggttaatataaggacacacctatgccagcagtcattgataaagcattggatttcatcggtggtatgaatacgtctgagccagtaccacagtctatggatgaaagtaccgcgaagggaattctcaaatatttaaaagaactgggcgtacccgccaccccggccgacgtcgctgcgcgcggccaacagcagggctggagcgctgggtttaccgataaagtggcggagtgggctgaacgggtcgccgccggcgaacggctggtgattaagcatccggaattcttttccacctatatgcgggaagagctgcgcgccctggtgtaatcgccgcgcatctaccccgccccttcagcttaatgccttcccctattgggaaggcattcttgttactgccctcgatagccgccgcccagggctttgatcagggtaatgtcggtgcttagccgctgggtctcaatgtccagcagcaacagctgctgggcgaggaccgcccggcgggcttcttcggcggcgtagcggctgaggaggccgcgctgataatgagcgcgagcgctatcggtggtggtctgcgccgcggtgacttttagctgctgcagcgcgcgctgctgattcaggtcgttaagctggctggagctgatagcgacatcgcgaaccgcatccagcaccgcctggttgtactgtttgatcaggatgttgctggcggtgcgtaccgactgcagattagcgttcagacgaccgccgtcgaagatcggcagatacagcccgggcagcaggttgatctgctggaaagaggacttaaacagatccccgacgctcagggcgttatagccccagaacgctttgatatcaaaatggggatagaaggccgctttcgccgcatcgacctggctcagggaggcggtgacgtagccgcgcagcgcctgcaggtccggacggcgggccagcagctcgaaagagagcgacggcggcagcgtctcctggagcgccggcagcgccaccggatggatggccggcatgctctgcgcatcggcgccgataagcgcccgcagggtttcacgatactgggtcagcatcccctcggcgctaatgatctgctggcgagcggcgagctgttcggcctgggcgttggccacatccacactgtcttccaggccgcgccgggtccggtgctcgtgggcttccaccgagaatcgggcaatgccctccagctcctgcagcagcgcgattttctggaacgtcgcctgcatggcgaaatagagctgcgccacgctgctggcgatgtcgagctcaatgccggcggtctccgccagccgggcgtttttctcgccaatagcggcggcgacccgggcgcgatcggccccccagagatcgatattcagctgcgccccgacgccaacggtattcagcgtataccaggggccgtttttatccaccggcagggagtatgagtagggccagctaaaggatttgtcggtgatccgcaggcggttttgcgccgcgacggcggtggcctgcaggcccatcgccgaccgggcgagttccaccgtggactgcgactgggagatgcgcagccgggcggcctgcatggtcggcgagttctgcagcgcccggttgatcagcatattgagctgaggatcatcataggcctcccaccagcgggcggccggccagtcgctgttcgccaggtggatcacctgcgccagctgggcctgctgcggattgacgatggcgacctgggcaggctcatcctggatcagcgcgcagccgctgagcaacgtcagcgtcagggtaaaaagagtgccgcgcaggcgcgcggagaaaggaaggatcatcatgacgttttagcctgttgctcagtcgctatcggtgtcggcccccagtcgggcagggcggccagcgcggcggccagcgccgggccaaaggggttagtcaggtcggcggtcagctgttcgccaggcgccgtcgcctcctgttcgatacgttcagcgtagcgccgcagctgttcggcgcagcgggccagggtcgggtctcccggcgcggcgttgagtcggtagccttcgctgaggcgggcgatctcctcggcctgggcgagggtggcgcgcatcggccagcctttcgcctggggccaggggtgagcatacgtgcccagcggttcggcgcgaacccggtggagcagcgcttcgctgtcggtgaaggcgacaagcaggggagccagcggaaccgcctccttcggggcggcgaggcagtccgccagccggcgataaagtgccgcaaggcgggttttcagctgcggcgcttcgctgtccggccagagatacaaatgaacaatggaggagaccagcaccccgagcaggatgcccagcacccgatcccgcagctcggtgaggttcgtcagcggagcaaaccagctgagaaaggccagcgcaaaggtgaaaccaatctggatcccggcgtaggcgatacgctccgagccggcggcaatccacgccgccagcgccagcaccggcagggacatcgccagcaggcccgtcagcgaatcggtccagggctggacaaagacgattaacagcagcgccagcagggaggcgagcagcgccccgccgatgcgcagccatgtcttttgcatcgtggcgcccagcccgggctgggcgacgatcacgcagctcagcataatggtatgtagaccctgccagtcggcagcggtatagaagacatagcagattagggtcgccagcagggtcttgagcgcaaaatggagatatgccgggttgcgccaggcgtccggcgccagtaggggcgccttctccacctcaccctgcggcagggcaaccggctcaccctgcgccagccgctgcagagtggtagccatctcctgcagaacagcgcgattgacgccgcgaccgctgagcgtcaggggaggaatagcgccgtcaaacggcccctcgctaagggcgttcttcagctgaagtaccgcctgcgacagctgctggcgatcgtcactatccgcctcgtctgcttgcagcagggccgccagctggtagcagcgcaaagtggcggccagccgcgagcgccaggcctggggatcggcggcgatctccggtgtcgcccggctggcctgggtgaatagcgactgcagctgattgaactgcgcggcggtctcgccgaaggtcggtggcgcttcagcgtccggggccgccagccgccgggcgacctcgtgcagcatcccggccagacgcgccttaaactggttaccgggaaaggcctgctgaaagcaggcgttaaccagcagggtgacgaggatcgcggtgttaatcgccacccacagccaaagcagcagccgcaccaggatctcgctctggctggtcatcgacgggaaggtctgagcgtaaatcaccgccagcgccaccacgaaaaaggccagtcccagcttgcccagcacccgcatcagatagagggcgcagaaaaagagcgccacggaggctgccaggcggatcagcgggtagtcataggtccacttgatgatcagcagcacgccgccgagcgccacggtgacggtgacaaaaaagaccacgctgaccagcttaatcatcaacacgttaggctggctgacgtagaacacgacgatcagcgcaacggccaggaaagggatctgcagggtcataaacagggtgatgagcaccgcgcagcttagcgtcaggcgcagcgtgtagctggcgcgtcccggcgcgtcgcgcagttcctggcgtaaaaaatgggcgagaggaaacatagcgtcgcccggctacggctgcagcacggcgctggccgaggcgcccatgcggaacagttccgggtcgggatcgctgacggcgattttcaccgggaagcgctgcgagacgtggacccagttaatgcttttctggatcagcggcagcccttcgatgacgctcccaccttcgggcaggactccggagccgaccgaatccaccaccccgttaaaggtccggttgtggttggtcatcacggtgatccgcgccgccacgccggggcgcacgttgttcaggtcggtttcgcggaagttcgcgatcacataccagcggtcgtcatccagcagggtgaagaccggcttcagcgccgaggcgtactggccgacggtggttttcagcgccaccaccacgccgttgaacggcgcgcgtacttcggtaaattccagatgcagttcagcgagggcgatttgcgccaggaccccggcgcgttgcgccaccatggcatccacgccggtcacggccgccgaggcctgtttggcctgcagcagcgtggcctccagctctgcccgcgccgctttctcagcggtgcgcgcctgatcgagatcttcctgggaagcgaacccctgcggcaccagcggctcaaggcggatacgcgtggaggtggtctgcttaaccagcgctctggcgcgctcgacggcggccgccaccgactgggcgttatactcttgcgctttgatggtgcgctgggtcagcatgatctgcgcgtcgagggtcgtcagccgggctttcgcgtcatcgagcattgcctgataggggcgggggtcgatgcggaacaacagatcgccttttctcacccgctggttatcgcgaatgggcatctccacgatgcgtccgctgacctcgggcactacatcgatggtatcggcatagacataggcgtcattggtctccggcgaggtttgcaactgccagataacgaggatcagcgccaggatggcggcaaggaccagcgccagcagaggccactttttgcgtaacaggggagtgcgggaagttgtcataagcgatcagtgaacaaaaaacagaaaccacagcaacgtggcgaacaggaacatcagcgcgacgtagctgaagaccaggggagaaaagcgcggctgccagcctttacgggtaatcaggatatggcaggggatcagtaaaaacgcaccgcccagtaagcagaaaaaccagccgggaaaagcagcgcccaataccgggatctctggcgaaagtgagcagccggaaagcggcaagacgagcagtaaccgcgccgggcgggcgatggtggcaatatgattcaatggaacatccctgagtgatcataccagtgtgtcatgagtgtaatcgcctcgttgcgggaatgaaagtcaaccgatcgttgactgcgggatccttgcgcgatgggagagcatgatgtgaggcgtcaattcccgcgcttgcgcatagtcagccgccacggcgagggctatgcttagcctgaaagataaaaacgaccgaggcaatgtcatggataaggaattactggaagccggctaccgggcctacaccggggagaaaatcgacgtctactttaatacggcgatctgtcagcattccgggaactgcgtgcgcggcagcgcgaagctcttcaacctgaagcgtaagccgtggattatcccggatgaagtggatgtcgcgacggtggtaaacgtgattgatacctgcccgagcggcgctctgcaatatcgtcataaataagcgaggagaagatggaaatactggaagggcataacaaattttatgttaacgacgcgcagggaaaccaggtggcggagattgtttttgttcccaccggcgaacacctcagcattatcgaacataccgatgttgatcccagcctgaaaggccagggcgtggggaaacagctggtggcgaaggtagtggaaaaaatgcgccaggagcaacggaagattatccctctctgcccgtttgccaaacatgaattcgataacacccgcgaatacgacgatattcgcgcatgacgtaccggcaccggtgctaaccggtgcgcttttctcgcaccctcaacgtttcgccggatcgcgctggtgggaaaagcggcggatcagatccgggagatgttcgcgccgcatcggtggtgaaaacagatagccctggaagcgatcaatccccagcgattttaactgcgtaaatttcgccagtgaatccaccccttccgccacacagcggctgccgctcaactggcagtagtaggccaggctttttattagcgcaagcgcctttggatcgtgctgggcgtcattgacgatgctcatatccagtttatacgcattgaagtgcagtcgacgcgccggaaagataacgctcccctgagaaaagcagtcgtccagcatcacgcgcacgccagcacgttgcagctgcgccacgtgggcggcggagcggctctgatggcgaaaatcgatagtttcagcatattccagcaccagccttgccacgccctctggctgccgaagctgctggcgagcggcttccaccatccgcagcaggctgtcactgtcggcgagtgaggagggtatgttgaccgaaaaatagaaggcgcctggatactcattaatattctgcacggcctcctgcagaacaaaggccgtaagcagcagccaggtgtagtcggcgcggaagtgcggcagaaaggtctgggggtgaagtacctggccgcggtggcgccagcggatcaggatctccaccccctgtagctgtgagcgactatcgacgataggttgaaaaaccgggaagacctggcgatcgtgaatcgcttgtacccattcctgttcaaacgccgtcagtgcgtttgcgggtgagcgcggcagcagcgtgcgcggaaagcggggggccagatgcggatgacattccaccagctttttcaccccagccagccgttgggtgtagagcgttttctggctcaatccgagacgttgggcctgctcgcctatcgtctgcccttgcagcagggcgaggatcaccttgagctcggcgtgggtcaacccgacgacccgttttccgtggatcagggcggcttcgctggcaagccgctcaagccgcggcgcattctccagccgatgggccagctccgcgcaggacagatcggcgggggcagtatggacgttgcgcagacgatccggatgactcacctgatagagcagcgtttgccacagccagatggccgggctgcggctcagaatcaacatcggtaacggcggcaaggcctcgtcgagtagccttgccgcctggcgcagcgtggtgagcatccacaggggatcgtcagggagatacaccacgatccgcttcacggcggccagctcgcgcagggacacgccctcgaccggcagctcaacgggccgcttcgcggcgttcagcatcagctggctcaacccgcgggcggccagcgagcagggcgagaggatataatcggtcatcattgatagacaaaggtgatgccgatgatcgactgcacgttgccggcggtaacctggcctgtggtccgggcataggtggccgtcaggccgaggttgaccggcgaggtgccgacggtgcccagcgagaccgtgctgttcgccgggacggcgctgccgttgcgcgtcagctgaacgcctatcccctgcgccggcgaggcggaggcggtattggtgaagatcgcgttggcgctgtccgcggtggtgccggagaggtaataccccagctgctggctttgcgcgcagtggacggtgagcggcacggccatcgatcccgggtagtcggggagggtgacggtgacatcgcgggcggagacgtcgcagccgccggtggggaccaccacgtcgttgttggcgtaaatgttccagatgaactggaaggagtcgctattgtagttgttggtctgatgcaggatcagcaccgcgattaacgatcctgcggtgatggccactccaccggcagtgctcaccggcgtcagatacaggacggccggccagggtttatcggtccgtgaatcataaatcacccgcgcggtttccgtggtggtcgggaacgggtaagaggtgccgttatatttcacggtgcctgaaaaactcgacagcacaccgccataggcggatccgcgctgcagggtcacgtagtcggtgatcgtttccggatagtcgttatggcaaaaaatctgcgtggagaggtcgaccaccaggttttgcccgacgttcaccgccggggtcaggttaacgtagacgttggctgacccgccgccgatgggaatcgtcgccccggtggccgttttgcaggcaaaagaccaggcgttcatcgaccagcccagcagcagcagggtggtgaacagggggattatttttttcatcatgatgctctcctggctcaggcgtaggtataggtgacgttaatcaccgcctgaatggtgccttgcgtggcgccgccgttgacggacagcgccctgacctgcagcgggaagcgagcggactggctggcctcatccacctgtaccgactggctgctgccattgttcagcgtggtgccgtcctcgttctgcagttcgagctgaatattgcccgccgttccctggtttttgtaatagccggtgctgtccgccgttccgctgaaggtggctttcacccgtgaagtacccacggggcagttgctcagatccagcgccacgctgtgccaggccgatgccgagcccgcaccgatcaggctaaaggtatagagatcgcccagctcgacggtggcattgacggtggaaaccgtgcagggtctggccaccaccttgccgttgacggtgagagtgacgtcggccgcccgcagggaagcgctcgcggttaacaggccggccagcagccagcccacatgagtccatttcatttcagcctccgcttactgaaattccagggtgaatgttgctgtcgcattgacatgcccggcggtgacgggcacctgagtggccatcagccgggcgtaaaagttgagaatattggtctggcccggggtcagcgtggtccaggtcatggtagatgacggcgcattgaccggcagccgggactgctgctgatcgagaatttccacccccattcctgccgccgccgaggtcccggcatcgagttttaacaggctggtgttgatgctgtccgccacgccggtgaaaccgaccttcaccgcggtgacggaagtgccgcagggcgacagcacgatgcggaacggcaccggcggcgtcgtcgccccaacggcataaaactgcttcgcggcgttatcctgtaaatcgacagtaaaatccttcgattcgccggctaccgcgcaggcgttatcgcggacatagccgctgatggcgatcgtgctatcggcggcaagcgcagccggtgcgcccagggtgaacagggcgcccagcagatactgcagtgttctcatcataatctccttagcggcacgcgaccgaaagctgactgagcgcctgctgctggctctccggcggcagacggtaatcggccacgcactgagcgtccgggccatcgccccatttcacccgcactttgcccgccagcggcatcccgctcaggtagacctggccgttgtccgcgacgatgctgccgctctggttgctgtcgccggtggcgagggcgccaaacggcaccggtttgccgcgatgggtcagcgtcagcaggatcttcatccccacctgggcgttaaagttggcgcggacaatcgccccatgggtggtccccacgctgaccaccgcatcgtcaaggtcgacattgtccgccagggtgttggtatccagcgcgatccggttttcacgatactcagtggcataaggcaggacggcatacccgcgccagtcggtgcgtaccccggtctggttttccactttcacgccgccggcgccgggggctttcaccagcaccacggtatcgtttaacggttggctcagggtgatgccgttggcgtgcgccagcacgccgccgctgaccccgtaatagagctgtttaaagccatcgctgcggctgtagccgacgttggcgttgccgtagccgccgcggtagttgagggcggtgtagcctgtgctcccgttgtcgccgttgccgccgccggcatagccggtctgcacgctatagctgaggttgttgtcttccagcagggtgccgtacaggcccgccagattggtcatgcggccattgagatcgtgcgacaggctgtagctggcgctggcgtgccgccagaccgagcggctgtcggaacgcagccagtggctgaaggggatattgatattgatcgccagcatttgatcgcgcccctgctgccaggcgttttttgtcaggctgtagcttagcgaccagttgatatcgtccacggcggcgttgaggccggcctgcagctgctcatcggcatcgtcggtgccccagtaggtctggtggctaccgctgagatagagggtggcggtgcgccccaactgctgagtcacgctcagctgcaccttgccgcgcttgctgtaagccagattgtagtagtcggtaaatttcggttttacctggataacgccgtcctgggtttccacactgtagccgctcatccggcggtaagtggtatcggcaaagttataatagccgcgggtagagtagcggtagcccaccagctgcaggttggtgccggtctcatccagggatttgttatagagaaaacgcaccgactgcccctgatgttcgctgtcgtcagccagggtggcgttggcctgagtgatatccagcgacagggcgccgaaatagcccatgtttttccccaccccaaggttaaaggcgcgatagcggtctgccagctgggtgccgccgtagagcgtccagcctgccggcaggccatgcatggccgtgccctggaaaaaatcgggcgtttcctgctgactgttgccgctgcggtactccccggcggtgagggcgaagcgggtatggccttcacgctggagaaccggcaccgttgaccagggcacgctgaagacctggcgggagccatccgcttctttgatcgtgacctgcagatcgccgccattgcccgcggcgtagagatcgtcgatggtaaatggtcccggcggcactgtgctctggtagatttcgtagccgttttgcctgattgacacctgcgccgtgccgcgggcgatcccgtggatcaccggcgcaaagcctttctggctgtccggtagcatattgtcgtcggaggccagctgggcgccgcggaagttgatcccgtcgaagacatcgccgttggtgtagctgtcccctagggtgagtcgcgaacgcagaggcgtgatgtcccgctcaagccagctgttaacgtgctgccagcgattctcgttggatgaggtgctaccgccgctgctgtagctccaggtgctgttatcgcgcagacgccaggcgccaatgttcaggccgctctgtagattcagataggcgtaacggctgctgccacctgtggtgttatgggcgttattgcccgtgaagttatagtttatcagcccggcggtgataccgttatcccacagctccggcggaatatagccgcgcgcatggttacccataaatgcctgggggacggtgaggtacaggcgctgctgtccgacgtcgaagcgcgtggtagcttcgctgataagcgtggtcagcggcacgcaggccgtgctgtccagcgtcgccatgcccggcacccgaccggtatccacacccatgctcgccagctggccgcgtgtcaggcagggggacagaccgtgaccctgggcatcggcctggaaggtgacgtcccgggtggtcataaaaccattgttgagataaatatcgacgcgataggtgcctggcggaacctcctggcctttttcaaatcccgacaggtcagccaccgccgccggatcgtcagctaaaaagcgggggttaaaatagaggtccgcccgcgcggcaaacggctgtgagcagagccacagcgccagcgccggagataccaggcgccgggcagttcggcaacctaaatgatccagtccatatttccgatgtgacattatccctccggtccgacgttgcccggctgtcattgcttctggtcatgcgcagcgtgtcccgcgcggcggggcgcttctgggttagcgcagcacgccattcattttcggcgtcagcgcgccgtaatcattaatcgtgcgataggtgatggtgttcccggcatccgcgggtagcttgacgctggttttgcccatcggcggtacgagggcgttctccagaatgcgtgtcccggcgttcagttcggtcaccgtcaggtaatagggggtggggttcgtcagcgtcagcgacgatccgctacggctaaaggtcagcttttccgccgcttgatccggaggcagggccagttttcccggacggtagtagagcttgatgcggctgataatcgccagctgcagggtattgtcgctgagctttgatttatccatcgaagggatcgccttcacgttcatccagaacagactttcccgatcctgcggcagctggttattggtggcgtcgataatgcgcagggtgttctcttttttaccctgcatggcaaacagcggaggagtgatgacaaaccggccgtctcgctgaccatctgcattttccacccatgactgaataagccaggtactgttgtcatcattattggtcaccgcgagctggacctgcttctgtcccgccgggtagataacccgggtcgcgccaagcgcaacgcccgcctgcgcgctggcgctaaagatactggcggcgaaaagcacacatcctgccagtaagccatgcgccatcgttgccgtttttctcacattatctccttgtctgctcaccgtgttgtcctgtttgtctgcggattaattactgataggtcaatgagaaccaggcctgggcattggctgcaccgccggtgacctggcgtccggtcgcccgatatttggcgacgaaatttagcgtcgtcggtccgcggtagagtgatatccagcgatccgttggacgattgagcgggagctgctggccctggctgtcgaatagcgcaataccgatcccactggcgatccccggaccttcacccaccgacagcacgtcggggttttttccatcagccacgccgtgaaaggtcacccccacatgctggctgaccgccgtactgcaatcctgtaaatgaatcgcgaaagggattgggttgctgtcttcgccgacagcatgaaatcgattactgctgatctgccccagattgaccgtcatctgccgatcgccggcttcgacgcggcaggagctcgccataatcaggccctgaaaacgcatgctgccccccggcagcgtgacgttccaatgattaccggccagcgccagcggaggcagtagcagcagcagaccagatttcattccctgcatcgtttcactccggttgaaaatagagagcgggccctcctggcccgaatagcttccctgcctgactcgggtcttactcgtactgcactttgaacgtggcatccgcgttcgctataccagccgtcgctgcgccggtcgcgtagtaacgtgcctggaacgggatgatgttggggccgtcattcagcgtggtcgcagcactgaaggtggcgccgtccagtgccagtggcgtaccggtattgtcgaggatctgcacgccgacgttggttgcgctgccggcggcagagttttgcagggccagaacggtggtattgctgctgtcgatggccgtaccggcgaaggcgacggacgctttggtggctaccgtagtgtcgcaatcatccagctggatgttgaaaccgacggccgaactggtgctccccgccgtggccagtttcgcggaacgcacctggcctaactgaacggtttgatcgatagagccggcatccaccgcacaggccgcattaacgacttctcctttaaaatgcacggtcccgccgttgaccgtggtggtatcggccagagctgccgtggagctcagtgacagggctgacacaacaatcattgccagtgttttgattttcatactgttttcctttgaacgatgtcgaaataacgaaccggattggcagccgttgtgccttccaggcatttcagatttcagccgagtggtccggctgccggctctgcacagttttcgcccaaccgatgagacaattggggccattttgactcgttgggataaatgatctgtattttgtgtcaattgggtattctgtggttttaaattctgccaaatttggtttttatggtaatataatctggtgtggtgggagggggtgcgaaaggaaaagcgatggcgttggcgacggatcgccggtgcagcagagatatggttagagaaaattgagtaattgcaggtttaaaaatagataataatcaattagatatgattttttttgcggaaatatggcgcagtgagttgcaaaatatgtcaaaacatttttatgatataaacagtttggccccaattgacctgttcgttatttttttaattatttaaaatcaatcagttatttcatttttcgtcttctggtctttttcctctaaaagattatttctttcccagatgccagcgaaacgtgccgcattactggcggtgtaacgtactgtatgacgaatattgcgatgtcctagataatcctgtatcaaacgcgtatctgtccctctttcagccagttcatagccgcaggcgtgacgcagcatatgggggtgagtgtgcgtgacggtacccgcattttccccggcggagcgaataatacgatacgcctgctggcgggagagcgcggtgccgcggcgggagataaacagtgcgtccgttttgtccgccgctttccagccggcacggaccaggctccagcgctcaatcgcctcgcgctcatcaaaacgcagtggatgaatcgtcgaaaaaccattctttaatcgccgcacattaacccgcccttcatggagatccagatcgtgataatgcagatccagcagttcgctaatgcgcatgccatggcgaaaggccagcagaatgaggcagtagtcccgttcgccggtagggccctgacgagcagcctgcatcatggcctgaacttctttggcggttagaaaacgacgtcggttcacaatagttgctcctgaaaataggtatgaatgaccgtcacagcgaaaccatacgccatgacgaaataggttctgtaatgctaaaacggtacagggtgaagatgattaatcatgaattgataacatattacattgccagacactaaaaatatcgtcgggtgataattcttaattttaaagattttaatcatcggctcaatagtatctgtgcgggttgccgccaggtatataaaatgaaaggatatttttcactaccagccgttattaaaaacacagccgcggaaattttttcccaccaataaatacccagtcttattcctgagtaaacgcagggttatattaactctcagtcataaggattaaataagaacttgtgggaacagtaatcctaattaacgcagggttaataatcatgaatattttaatttgtcgaccgctcgcgatacaacgccatccatggcgtcaaggctattggatcagcgacgatcgctgtttgtcacggggattgtcccagatgccatagaagcgtcccgcattgctggcggtataccagacggtgtggcggatattgcgatgcccgagataatcctgaatcaagcgggtatcgatccccatattcgccaacgcaaagccacaggagtgccgcagcatgtgcgggtggatctccagtggcagccccgccagtccccctgaggacgcgataatctgataaaactgttggcgggaaaggggattacctttgcgggagagaaacagccattcgctggcggcctgcggccagctgctgcgaatggccagccagcgctttagggcgtagatctctttatccagcaacgggtgggtagtcgaaaacccttttttaagccgatggatgtaaacacatcgggcagcaaggtcgatatccgatattcgtagacgacagatctcgctggcgcgcagaccatggatgaagcacagtaacgtcaggcaataattacgtgcagcataaggaccggtatcggccgctttaagtaaagactcaatttcattctgagtcaggaagttccttttttttatgtcggcgttattcgtcatggttttcccttttattgcaggcatatttttggttttccgagcctgcgtcaggtcattgttaaatttgactgcctttttattttgaaacagcgtggtgataacgttttaatttgctacgagcgcgagcggtatcatgggctagctccattgctaacgataagaggccgcgatctgaagggtaaagaaagggtgagctggctgaactgatgaatctttcctgggggtttccacgtcctgtacatccctgatcctcttgatgatacccgcatgatgatgaaggcttgggcttccggccacggcaaggcggctatcaatgccgtcatgattgattgcctgtttactgggcaatgtcaccccagtaaaccagcctccctcgccgacaaccttcgggaatggcatgagaaatttctcagacaaaatacaaccttaagtcgtctggatagcattcactgcaaaactacaacagtgattaaaccatactgcaaaaagcctggtgataatagcattgtctgtaatagagcacattacgccgtatttcaacgggtaagcttaatctggtacatgcggttgaatgagatgaaaactcgtcacggtcaacgtatacaggaagatatcaatgggaggtatagaggacaggtaagtattgcgacacggtctggcggcgggttggaatgctcgcttcggcgcgggaaggactcacatccaggatacgccgaagcctgccggttcaccacttttcgtcacgtgcctcctggcgcttgtcgctgcgccaggtggcctgtacggaaagcgatggcagcagtaaccagggtaagtaagcctcttttcatggaagtgatcctgctgaagagtacaataaatagcagttaaagaatattcttgccggaagcgcagcataataactgacaaaaaatgctcgccaagaaataacttatttatttttatctgtgattttttgagtaattattcctgttaaaaggtattggtaaccaataacgcataaaaagatatagctgtggtatgctcaagatattgaggcattctgcgctaatacggtgtcgggaagatagcgatcggtagataatgcggagcctggtgactacgtacaatcccgtgaacagcttcgacaaattcctcacccttaagcgctgacaccttcgctcgcctgtcgtaaagttgctgtcaggcggtttacgtttactacaatggtataacgatgacgactccgattgcgctccgcgactggcgcctgctggcggccgggtgcggcggccttctactgctggccgccgctatcaccttgcacagccactggggtgactttctccagtggtgtctcgccacccaaattaccctgcatcgctatctggtgatgtaccttctgttgctgaataaccatcagtacagcggcggtatctggctgctggtgggggcctttctctatggcgtgctgcacgccgtcggaccgggacacggtaaatttatcgtgacgacctacctgagcaccaatcaggagagcctgacggcggcgcgggtggtgccctttctcggcagcctgttgcagggcgtcactgcgatactcttcgtctttattcttgcggtggggctgaatctggccgccggcgatcttagcgccagccgctggtacgtcgagaagatcagcgccctgaccatcggcgtctttggggcttatgttatctttcgcgctctgcaaagcctgtggccggcaaaacaggtgattcgccgtctgacgccagcgcatcagcatgacgcctcgtgcggctgcggccatcacggcgtggggcaggatctgcagggcgctgactggaagacgcgccttggcgtggtgctggctatcggcgttcggccctgtagcggggcgatcatgattttattattcgccaacgcgttggggattgttagctggggcatcgccgcggtgatgagcatggcgctgggcaccgcgctctcgatcctcggtctgtcgctactggttcactatgcgcgccatcggacggtcaaacgattggccacgaatcaccgcccgcggccctggctggttccgctgatgaagatcctcggcggtctggcgctgatcctctttgccgtgggattgtttttcagcgtggtgccgatcagcgccaacggcgactttatcgccgctggctgttagcccgtttccagcagtcgcatcaacacccgcagcgcctgatccaactgctggcgttcaccgtcactgagtcctgccagcagttgccgttcgttgtcgacgtgggtttccactgcggcatcgatccgttcgcgtccggcaggggtcagggcgaccagcatactgcgggcatcctccggattgggcaggcgggtaataaacccgcgtttctccagcgccttcagacgatgggtcatggtgccggaggtaatcatcagcgtggagaagagctgggtgggcgaaagtacgaaaggcgccccggcgcgccgcagcgtcgccagcatgtcaaactcccagcgcaccagatcgtggcgcgtaaaggccacttccacctgcggctccagcagcatagcgcatcgtttcaggcgacctatcggccccatggggctgcagtcgaggtctggccgctcccgctgccactgggcgaggatgcgatccacggcgtcgatcggcggtgatttgtccattagtgctcacttgtcttgatatcaagatacttggcggtacatacttcactcactaatttaccttgaagtgaagataaaatcatggcttttctctcacgtaatctgattctcgacctgctgctcaccgcgctggcgcccgctatctgggggacgacctacatcgtcacctcccagcttcttcctcctgaccgcccatttattgctgcgctgctgagggtgctgccggcaggtatcgccctgctgatctggagccgtcgttttccgcagcgcggcgaatgggcaaagctgatcgttaccggcatcttaaatatcggcgcgtttcaggcgctgttgtttatcgccgcctatcgcttacccggcgggctggcggcggtgatcggcgcgatccagccgctgctggtgatgctcctcgcctggtgcgtcgaccggcagcgctcgccctggctggcggtgttctccgccatcgccggcatactcggtatggccatgctgctgctgtcgccgcacaccgtcctcgccccgctgggcatcggcgcggcgtttctcggggcgatcagtatggcgctgggcacctggctctcccggcgctgggcgctctccctgccgatcgtcgcgctgaccggctggcagctgacgatcggtggagtggtgctgaccccggtggcgctgatcgttgaccctcctttgcatcaggtaacagtgctgcaggcggccggctatctgtggctgtgcctggcgggcgccatgctggcctatggcctgtggtttcgggggattggccgcctctcaccggtggccgtgtcggcgatgagtctgctgagcccggtgaccgccgtggtactgggatggatattcctcggacaaaagatccaggggatggcgctgatgggattgatcgtggtgctggcgagcgtgatgtctatccagcgcgcgctggcgcgtcaggcggcgggagcaaaaacgaaaaaagccccgtaacggggctcgacattgctgcgtgcggggtgagcggcgggagccagaccagccacccgcaggcggcctgtccggcagctccctctgcaaccattcgcttatttagacagctcggcggtcatatggacctggttgccggtataggcttcggtgatgtggtaggaagcgccttgttctttcgcaatggttgcgattttcgcttctgcgctgtccagggtgtctgctgtcacgctcaccggatgagcgaagctagcgaaagagaccagggagagcataccggcagcggcgagtaattttacgtttttcatggtgtttgtccttttaacttttatggtggaaagcatgtttgctttcgatggacttataataagtctgctaactataacgcgcgtggcaaaaagtgcgatttagatcacatttttatggcggtttgatggcgtaaacatgatcgtttatctattttttaatttaaaaacaatgaattaatgatttacttctgaaaggggggatcacatgggctgcccttgttcagggagaggaatgcgcctcattcatgctttcatcattcgttgtgtgaattgtttggtgctgttttcaccaccgcaaaggcagattcagacttatcgcgatggccttccgagggctttttctgcatgctgttgcggtcactgtctctcgctctggcgttaggcttgctgcgctgtaaacaaccaccctcgcgttttcatctatcaatgactgtttattaatagccgatggttatctgttatataacttaatgaaacgtgaacaaatgtatatttgtcggcgaataaatagcattctttgacgccgatagcaccagcgaacttatatttttaggttcgttacctgacgccttaaatattgcggctcccggtcagtcgaagattctattagcagtggcataaatcagcatcgcctgatgtttctggttctatgcgaattcacagtgtgctcattgattcgtaattcactctgacaaggaaatggcaatgaaaaaggttcttctctctgcagcaatggcaaccgcgttttttggcatgactgctgcccatgcagctgataccaatgttggcggcggccaggttaatttcttcggtaaagttaccgatgtatcctgtactgtttccgttaacggccagggcagcgatgcgaacgtttacctgtctccggtaaccctgactgaagttaaagcggcagcagcggatacttacctgaaaccgaaatctttcaccattgacgtctctaactgccaggctgctgatggcactaaacaggatgacgtaagcaaactgggcgtgaactggaccggcggtaacctgctggctggcgcaaccagcaaacaacagggctacctggcgaacaccgaagcttccggtgctcagaacatccagctggtgctgtctactgacaacgctaccgcgctgaccaacaaaatcatcccgggtgacagcactcagccgaaagcgaaaggcgacgcttccgctgtagctgatggcgcgcgtttcacctactacgtaggctacgccaccagcgcgccgaccacggtaaccaccggtgtggttaacagctacgcgacttacgaaattacttaccagtaattccgtcagaaaataaaactgccccgcgatggggcagttaataacaataataaagcggcaatgtccgccgcttgtatttttattctgaggtcagcatgaagcgtattgccctttttttctgtttcatttttagttttgcggcccatgccaacaatattattgttaacggtacccgctttatttatccaggaaatgaaaaagaaataacggtacagctttcaaataacgccgaccgtccggcgctggcgcaggcctggctggataacggcgatgccgatgccacaccggataccattaccaccccgtttattatcaccccgccgatttcgcgcgttgacgccaagagcggccagacgctgcgtattaagctcggtagcagcgccggtctggcgaaagataaagagacgctgtggtggctgaatctgctggaaattccgccagtggtggccaatcagaaaaatgaaggccagaacgtgctgcagctggcgatccgttcgcgctttaaatttatttatcgtcctgccggactgggcaaccgcgatgcggcggccgagaagctgaccctgaccgccagcggcagtagtctcgccatcaacaacccgacgccgttctacattaccgtcagccgtatttcccgcgacggcggtaaagccctgaacagcaaaaccgtgatgctggcgccgcagtccagccagacggtggcgctctcctccgccgtcaaccgcggcgaaaccctgaccgttaacaacattaatgactatggcgccgatgtcgcagtgaaagtggccgttaaataagggaaaagctaatgaagcagaggtcattctgcccgggaagattaagcaccgcgatcgccatcgcgctgtgctgctttccgccattttccagcggacaggaaaacccgggaacggtatatcagtttaacgacggctttattgtcggcagtcgcgaaaaggtcgatctgtcgcgcttttcgaccagcgcgattaccgaaggcacttactcccttgacgtctacaccaacgacgagtggaaagggcgctacgatttacgcatcgcgcgcgataaagatggtcggctgggcgtctgctacaccaaagcgatgctggcccaatatggcatcgcggcggaaaagctcaatccgcagctgagcgagcaggagggctactgcggtagcctcaaatcctggcgcaacgaagaaaacgtcaaagacaacctggtccagtcctccctgcggttgaacatttcggtaccgcagatctatgaagatcaacgcctgaaaaactatgtcagcccggagttctgggacaaaggtattaccgcgctcaatcttggctggatggcgaacgcctggaacagccatacctcttcggtaggcgggtcggataacagcagcgcctatctgggcgtcaacgccggtctgtcgtgggacggctggctgctgaagcacatcggcaacctgaactggcagcagcagcagggtaaagcgcactggaacagcaaccagacctatctccagcgccctatcccacagctcaactccatcgtcagcggcgggcagattttcaccaatggtgaatttttcgacaccatcggtctgcgcggggttaatctttccaccgatgacaatatgttcccggacggcatgcgctcgtatgctccggaaattcgcggcgtggcgcagagcaacgccctcgtcaccgtgcgccagggcagcaatattatctatcagaccaccgttccgcccggaccatttaccctgcaggatgtctatccttccggctatggcagcgatcttgaggtctcggtgaaagaagcggatggctcggtagaagtgtttagcgtgccttacgcttccgtcgcccagctgctgcgtccgggaatgacccgctacgcgctctccgccggtaaagtggacgacagcgcgctgcgcaacaagccgatgctctatcaggcgacctggcagcacgggatcaacaatctgttgaccggctacaccggggtcaccggttttgacgactatcaggccttcctggtggggacagggatgaacaccggcatcggcgcgctctcttttgacgtcacccattcgcggttgaagagcgatgcccatgatgactcgggtcagagctatcgcgcgacctttaaccgcatgtttaccgatacccagaccagcatcgtgttggcggcgtatcgctactcgacgaaaggttattacaacctcaacgacgcgctgtacgccgtcgatcaggaaaaaaatagtcgcagcaactacaccctgtggcggcaaaaaaacggcatgaccttcacggtgaaccagaacctgccggacggctggggcgggttttatctcagcggccgtatctccgattactggaaccgctccgggaccgagaagcagtatcaggtcagctacaacaattcatttggtcgtctctcctggtcggcgagcgcgcagcgcgtctatacgccagacagctccggtcatcgtcgcgacgatcgtatttcactcaacttcagctacccgctgtggtttggcgataaccgcaccgccaacctgacgtcgaacacctcgttcaataactcgcgctttgccagctcgcagattggtatcaacggttcgctggacagtgaaaacaaccttaactacggcgtgtcgaccaccaccgccaccggcggtcagcatgatgtggcgctcaacggcagctaccgtacgccatggaccaccctcaacggcagctacagccagggcgaaggctatcgtcagagcggcattggcgccagcgggacgatgatcgcccacagcggcggcgtggtgctctcaccggaaagcggctcgacgatggccctgattgaagccaaagacgcggccggggcgatgcttccgggatcgccgggcacccgtgtggacagcaatggttacgccatcctgccgtatctgcgcccgtaccggattaacgccgtggaaatcgacccgaaaggcagccatgacgacgtggccttcgatcgcaccgtggcgcaggttgtgccgtgggaaggcagcgtggttaaggtcgcgttcggcactaaggtgcagaacaacctcaccctgcaggcgcgccaggcgaaccacgagccgttgccgtttgcggcaagtattttctcccccgacggcaaggagatcggcgttgtcggccagggcagcatgatgtttatcagcgatgcgaacgccaaacgcgcgattgtgaagtggagcggcgggcagtgttcggtggatctgggacagcaaacaacaaaggatagcgtatgtcgctgaggaaattactaacgctttttatcgtcttaatggcgctgggaaccacctcgtcctgggcctcctgtacgcgtctctcatcgccaacggtgatgctggacatggtggtgggcagggtggtggtgcccccggatctgccggtgggctcggtgatccttacccgcgactggacgatgagcgctcccggcggggcaagctatcgctgtacttccggcaccaaccgctttgcggcgaagatcgtgtcgccaggggccacggaccttggaaataaaatctactccaccaacgtgccgggaatcggcatgcgtttcagccgcggcggcgcaacggtaaatatcgtctatcccgacgtcttttcgtcccgggtatataacaccaccaactattccctcgaagggtcgcgctttacgctggagattatcaaaaccgcggcaaccaccggcagcggcaccctggcggcgggtaagtacacctcctacgactgggagagcggcggtaacccgatcctcgaaacctatctgagcgccaacgccatcaccgtggtctcgccctcctgttcagtgctgagcgggaaaaatatgaatgtcgatgtgggttccatccggcgcaccgacctgaaaggggtcggcaccaccgccggcgggaaggattttaatatcgacctgcagtgcagcggcggcctgagtgaaacgggatatgccaacattagcacctcgttctccggtaccctggccaccagcactaccgccaccatgggcgccttgctgaatgaaaaagccggcagcgggatggcgaaaggcattggcatccaggtgctgaaggatggctccccgctgcagtttaataagaaatacaccgtcggccgcttgaataatcaggagacccgctacatcaccataccgctgcacgcgcgtttttatcagtatggcccgacgaccagcaccggcgaggtggagtcgcatatgatctttaacctgacgtacgattaatacgggagggggaatgaagggattgccgaaaaacactatcgcgtggctgctattttgcggcagcctcgccgccccctcggcgtggggttttgagaccaattacgatcgcggacgggtcgattttgccgggcgggtgacggatatttcctgtagcgtcgcgctaaacggcggccagcatgccggcagcggtaatgtctggctggcgccggtcagcctggcggaagtccacgatcgcggggccggggcgtttatgaaaccgcagccgtttaccctggcactgtcaaactgccagctgcgccatgatggtggggcagcctcgcaggatgaggtgcgtcgggtcagcgtgcgctgggtcgatggttttttactgacggcggtcggtaacgaaaatgccgggtatctggccaataccttgccggatggagcgcagaatatttatctggccctatcgactaacgataataatactctggataagagtaataaaattgtcccggcggacccgcagcaaaatcaggtgcgtttgcaggaaagcgcggtcagcggcggcctgttcacctattacgttggctatgtttcgccaacgccgaaaagcgccaccagcgggccgattaccagctgggcaacgtgggaattagtttataattaagtgacgttaaaaagccgggaattcccggctttttttacatggcaatatcatcggcgaccagttgttcaatactgacttcccgccagtaatgtccctggatagcaaaccactccattccctgcagccattctttatgggcttcgctttccacaccttcaataatcacattatgatggttgcgcgataaaaaggtcaccagcgcatccatcagctggcggccggactctttgcgcatcaggtgccagaaaaaatccttatcaattttcacatagtcaaagtgataaccgcgaatagcgttaattcccgcgtagccggagccgaagtcgtcgagccacagtgaggtatcctgtgggctctgccaggcggcaagagaattatgcagcagattctcggcgttttcggttacctcgaaatggacgcaggtcagggcggcgactttggcttttatatccttctggcgcaacaggttcaggatatggtcatcaacgttaattgttgcggaaatatggttacgtaaaaaccaggctttatgcttttcaatcagtgccagttgttcgagaaaaatacgttcacgaacggcggcggtagcatggcggaaaaaatcttcgggggaaatagaaagattatcaaagcggcttaagcattccaccgcgaccagagtaccttgtggggaaaacattttctgaaagacgtagcgtacagcgatatcattacgagataaaatgttgtcttcgaatattttagtgttcattatccctcttcacgaggttagtcagacaataggcagaggatacattaattataggctacctgatgattaatgggaatggcgggaaatgtaaatcaacagcgaataagtacgctttatccgctactgatttaccgggagaacatttagcattgatggagagcggcaatacgctgattcatagtgcgggaattatcaatacccagtttttgcatgatatggatgcggtggctatgaaccgttttatgagcaatgccgagcagggcggcaatacgcttattattattgttggcaatgagcagttcgaggatctgacactcccgtggtgaaagctgtttgcgcaatcctcgcggcggcagttcgctgacgcctttggcgcgctggacgatagatgaaaaaagagttagcggagatttctcgctaataatcatagcgttgtcaaagtttatcaactctctgcacagcccgacaatgtcgcttttcaccattagcaccggctgctggcagcgcagcagggaaaggcggagcgcattcagcagatcgacgattctgatggcagaaatatccttattaattaaattgaaaataatcgtctgggccagtggcagatgtttctcatggatgacatcggcataactcagacgggtggcattttcatggctatcaataaggtagtgatagattgagtgaccaatgagattgtcattggtgtacagcaatatactgtccaaggttgtcagattctctttttgcgcttggcttctaagatcaggtccagcagtatcttctctattctgcgctggtcatcgagatggcggaacttaaactggcaggatatctgatagtagctctcactctcttcattagcgttatccagggtgataacaatgacatttttgaccaccaggtcgatggtgatctcgccatattctgcaagcataagtacggcgtttttcagtaaggcgttgtggctgagaaatttaagattcggcgttttggtcatcaatgcgcaaccgccatctgaaatgtctttgatatcgaaaagatagttttcgccgtttttatggcggccgcggcaataaaagtcatgctcatggcgtaaacgaaagcggggatcgcggcgacgctgcactacctgcaggcattcaggcaatgaaaaagcgtagcggatacctttatcgacaccgctattgtcatgttttgtcagggccgcattaaactctattttccctgaatcgctatgcaggagaaagcgaattttatgcccggacgggattttgcgatgggtctgaatatgaaactcggcaaagtccacgcgcgtcagttgggttatgatactggtgttgttaaaaaatatttcaatttcagtacgtttgcgcaactcctctctgaaaatagcaataatttcatacttactggtctttatcgttccctctgtcatatgcatcccttgtaaatagttgtcgtgaggcgtttgatttttcttatagcaatagcaacattctgattgggttaatcagatgtttttatgagcgtttgatgttattgactatctttgcagccagattgatatgtataaacttggaatttgatattgtatttcctgtaatcaagagtttcgaattttggtcatgacaaaaacgacaacggcctccaagctggagaccggtcgaaggataaaaacttaagtttaattaacggggataatgagagaacgatcgtcgatcacgccccatttgtaggatctatagtgccagtagcggtgaggtttttccaggcaaatattgaggagggatagggttccctccattttgtctggcaggtcagcggcgcgcggcggtggcgatattatcgagggtacgcagcgcttccgcgggcaggaccagctcagcagcggcaatattttctgcgaggtgcgtgcgggaggaggtgccggggatcagcagaatatttggcgctcgctggagcagccaggcgagggcgacctgcatcggcgtcgcctcaagcgaagccgcgacctcgttcaactcctgcgcctgcaacggcgtaaaaccgcccagcgggaaaaagggcacccaggcgatgtgctgggcggccagcgcatccaccagcgcgtcgtcggcgcgatgggcaacgttataaaggttttgcacgcagacgatgggcgtcattttctgcgcatccgcgacctgctttgccgtcacgttgctgaggccgatatggcggattaatcctcgctctttcagttccagcagggtggcgagtggcgcctccagcgaaccctccaccgggccgtgcgggctcagcatactgcgcagattaaccacttccagtacctcaagccccaggtgacgcaaattgtcttcaacggcctgggtcagttcggcgggcgacatggccggtagccagttgcctttctcgtcacggcgggcgctgaccttggtgacaatgcacagatcgtcagggtaggggtggagcgctttgcggatcaactgattggtgacatgtggaccgtagaaatcagaggtatcgatatggtttatcccggcctcgacggcggcctgtagtacgcgcaccgcttcttcaggatctttgggcgggccgaaaacaccggggccggccagttgcatcgcgccgtaacctaagcgatagacctggcgatcgccgagcgtgccgcgaccggataaggtgacactggacataagaactctcctcacggtggctaagccgtaagtgtaatccgctcacaaggaaggcaagggggagaatattgtcagaatgtgcgacagcagctcaggcagccgctgtcgccagaggggattagccgaagaacatcaccgacacgcagagcaggccaaccaccagcgtaatggcgttacccaccgagcggtacggcttcagcgccggaatgagccatgtcgacagcgtgggcatgataaacaggatcatggcgataagcggtccgctgatagcgtagatcattgagatcgcattcgggttgataaagcacaccgcaaaagtgaaggcggagaccagcaggatcgacatcgcgcggttgaaagcgcggctcttacgcacgcccagcaggcccagcgagcttttgacgatttcgctggcgccctcaatcactccgaagtaggttccgagaaacgacttcgacatagcgacgacggcgacgatgatgccggtcaccgccagccatcccggcgcgcctggctccatcgacagggcggagaggatagtcaccccctgatcgcgggcggtctctatataggttgccgggatcgccagcagacaactgaagacaaaaaacagcacgctggcgcagatgatggtgtaggccaccttcatgatttttttgcatttacccatggccaggtcgccgtgtttctcctgctgatcgatagcaaaagtcgagatgatcggcgtatggctaaaagcgaaaaccatcacgggaatagagatccagacctggtggagcgtctgcgggctgaactgcatctggctggtgagatgctccggatgccagtcgcggattaaatagagggagagaaacaggaaacaggcgataagcgggaagaccagaaagcccatcaccttgatggtgacctgccgtcccatgagaaagatcaggttgaggaccagcacgacccccagactcagcagcgcacgcagccctggggtcatcggcgtgcgatgcgccacctgttcggccagcgagttggtgatggccacggcgtagatgagcaccaccacaaagaaggcaaggaaatagaggccggtgatcaggttgccaattttcttaccatagtagtgattaactgcgccggtgatcccggttcccggcgcgatattggccgagagaataaactggctcagcgctttgtggggccagtaagtgagcggccaggcgaccagcgcggtgatgaacagcacaatggcgccagccgaacccagctggatcggtagaaatagcgtcccagcgcctactgcagtgccatataaggcaaaactccatagagtttcttctttagaccaaattttagacattatgcgactttatcaaccgtcaaaccaaaaaaaaggagtgcaatttaccatatttatggttcgtctgttgcgatagtttttggtgataaagtcgcggcggatcgtcgaagatccgcgccgggattaaccgcgcgccgtctggcgcgggcggcggtgacgaataacgcgctcgcgcagggtgtcccatatccagttaaaggccatggtgtagggcaggaagaaaagcataaaaccgatctccagcataaacgcctgcagcagcgagacgcccagcacgatcgccaccatagtgacgccaatgatgacgaatccggtttcgaaaccgagcgcgtgcagggcgcgtactttcagctggcgggggaagcgggagaccggccacaggcgatcgaacgccgcgttatagataatgttccataccatcgccagggtggcgagcagaatgctcagtccgcccatctccactaccgagcgctgcatcagccaggcggcggtaggggcgaggatcagcgtcgccagtccttcgaaggtgatggcgtggataacgcgttcggtgagcgtcttgcgctgatgtggggtctgttgcatggcgagctacctccagttttagcctgaacaggaaattacccggcagtttatggaaaaatatgataaacaaaagataggacccatcgatattgtagatacatcatgcgttattcaccggaagccttaaccgcctttgtcgaggcggtcgacagcggatcgttctccgccgccgcccgccgcctgcggaaaagtcagtcgacgatcagtaccgccatcgccaatctggaggccgatctcggcgtaatcctctttgacagggcaacgcggcaaccgacgctgaccccgcagggggagcaggtgctgagctatgtcaaagcgattcttgccgccagcgagcggctggacgaactggctgtgtcgctgtccggcgagacggagccgcggctgaccttcgtgctctccgatactctgcacccggacgtgctggaagatctgctggtacagtttgaccgccgctttcctcataccgagtttgagtgtttgattggcgaagacgaggatgtgatcgatctcctgcaaaaatcccgcgcccaggtggggctgattgaggcgagggagcgctaccccaccgatatcggcagcacccgcctgccgctgcagacggcgatgggcatttatgtagcccctggccatccgctggcggcgcagggtaaggtcgcctgggatgagctgcgcagctggcgcgagctgcgtttgagcacctttctggccagcgccaccgaacctgccgcaggccaggtctggtcggcgccaaactacctgctgctgctcagcatggcggcgcaggggttcggctggtgcattctgcccagcgcgctggtggcggagtttgcgccgcagggcgggctggtggcgctcgatatccccggctggccgcgggcgatttcagtcgatctgctgtggaataagaaagcgccgccgggagcggccggcagctggctgcgtcagcatctgcagcggcgtgaacgttaacgaatagctatttctttgtgattggcttcactttttttaaacaattacaaagttttttgataacaattatctagtatatcgctgtttctttgcgcaaatgcatgggcaggggtagaggatgaaggatgtcgtgatcgtcggcgcgctgcgaacgccgattggctgctttcagggcgcattatcgcgccattcagccgtcgagctggggagcgtggtggtgaaggcgctggtggagaagacgggaatcgatccgcacagcgtggatgaggtgatcctcggccaggtactgaccgcggggaccggacaaaatccggcgcgtcagtccgctattcgcggtgggctgcctaacaccgtatcggctatcaccattaacgatgtctgcggttccggcctgaaggctctgcacctcgctacccaggcgatccagtgcggggaagcggacgtggtgatcgctggcggccaggagaatatgagccgcgctccgcatgtgcttaccgacagccgcaccggcgcccagctgggcaacagccagctgattgacagtctggtgcatgatgggctgtgggatgctttcaacgattatcatatgggcgtcacggcggaaaacctggcccgggaatttggcatcagtcgcgagctgcaggacgcctgggcgctcagctcacagcataaggcgcgcaaggcgattgattccggtcgctttcgcgatgagatcgtcccggttgtcaccgagcataacggcgcggcgcgcaccgtggataccgatgaacaaccgcgggtggatgccagcgcggaagggctggccagcctgcagcccaccttcgatcgccttggatcggtaaccgccggcaacgcctcaagcatcaatgacggcgcggcggcggtaatgatgatgagcgaggctaaagcgctggagctggggctgccgatccttgcgcggatccgcgccttcgccagcgtcggcgtcgatccggcgctgatgggcattgccccggtgcatgccacccgtcgctgtctggagcgggccggctggcggctggacgacgtcgatctgatcgaagccaatgaggcctttgccgctcaggcgatctcggttggccgggtactggagtgggatgagcgccgggtcaacgtcaacggcggcgcgatcgccctcggccaccccatcggcgcctccggctgccggattctggtgtcgctggtgcatgaaatgatcaagcgcgatgcccgcaaaggtctggcgacgctgtgcattggcggcggtcagggcgtggcgctggcggtagaacgcgcatagcgctatacctcgatttccatggcctcctgcgggaggccttttttatgcgccgtgctttgccgaccccttattttttcccctccctctttcactctccccggcgaaattattgagcttcgtcacgtcttgttgtgccaccttttttgaaacaaataactacgatcctggtcactaaaactatggtgtctaaaaaataaaatgatgtttcataaaaacgaaatgtcattttatttattgtaagggtaccctatgttaaaacgctctctggttctcgccgccctctgcggtatgtcttttgcagcaaccgcggtaacgatagatttacgtcatgaatttattgatggcggaaagagtgataaaagtaatgctgaccgcgtctccgtttctcaccgctttgccaacggcttaggctttaccgtcgaggccaaatggcgttcgggtggcgacaacggttcgcaaccctattcggacgtggtgggcaatggtcatgaagacaccatcagctggcgctggaaagcgacgtcgaactttttcctcacccccgggtttaccattgagagcaacgacagccgctccatctacaagccgcacctgcacgcgcagtacagcttcgacaacggcttctatgtcgccgctcgctatcgctatgaatacacccgctatccgaacaacgccggcaaagatgatgacaaagttaaccgcggcgacgcgtgggccggatttgtcctcggcgactggcgtacagagctgaactatgtctatgcccgcagctcggaaggggtcagccgcaacgacaataaaccctactcgcaggaatataacgtgaaggtggcctataagctggataataactggtcgccgtatggtgaaattggcaacgtcggggtgaacgaccgcagcgatcgtcagacccgcttccgcgttggggtggcctactcgttctgaccgaccattcatccctcatcgtttgttttccccggcgccgtcagccggggtttttttatgggggaaagagaagggacaaaaaagccctccgcgaaggagggcaaggccagttacagaaaaaagtgtggtgtggatcaggcgctcagcattgacgggtgcgcgggtaatttcgcgatatagatggccggtttaccgtctttatcggagctgaacagaatggcgctatcgtccggggtaaatgaggggtgcgggtgcgttacctggcggctgttggccaccgtcgcccacgaggtatcatggcgcgcgacgcggaagtagcgcttttccgccacgttaaagacatacagccagggatcgttatcaatggagtagccgccggtatccttgacatccaccggtgtacctgagccatcgcctaccagcagcgtgccatcgaaattgctcatcagatgcgagcaggccggcatcgtcatcagggcctcgttgacgccgctttcgggatcaaagcgatagatcgtccgcccctgctggcctttcagataggagacgtagatcagcgccgaaccgtccggcacccaaaattcatgagtacagctttcgcctggagcatgcgctttgactttgcgaacatggctgccatcctcgttgaccagccacatgcgggcgtccaccagatcgtgcggcccttcatggcagaaggcgacggtatggtcgtcgaagggacgatagatcgggtgtcccagccagattttttcctcatggatcacctggctctcaccgctgcgcaggtcgacgcgcagcaggcggcagtgcggtcctttatggaagaaatcatggaaaatctgccagtcgttgagtggcgtccagtcgcttttggcaatctcaatgcccaccagtttgctgcaatcgctgtttgccacccaggtgccataccctacccagtcatcgctaacgcgataaacttcgcgctcggcgagggtggtcaggttgacttccagcaggatacggtcatttttcacgtaataaagcgacttatcgtccggggagaggaagccgccgaaggtgttatccccggcgccttcggttagctggacggcctcggcgctggcgatattcagcagatagtagttccagtggccgtcaaactcgccggcgaacagtaaatggctgccatcgttaaaaaagcacttctgatagaagtagttgcgatgacaggtgacctccgggggggttaagcgggtgacttccgccccggtatccggatcgtggctgacgtgataattcagtttgacccgcatgcctttagccatgtagtgctcctttctttcctgcgatgccgctggaccagaggcgtgtcgctgagtgatatgttttaaaagacgggtattaatttatcaaaacatcgtttcattatttgtgatggctcacgcagttcagcgtaattcccgcgttttcagcgggctgctggcttcgcttcggcacctctgcagacaatcggttgaatcttcatcttttcaaaaccttttccggcctggcgcgtgccgggaggctccttcgctttttctttttttgtaatcgtcatcataaaaaatgaaacatcgttttaaataatattgaaaatggctgggggcggggctaagatggcacccatcagcaaaacggaactctgttttaatttcattatggtgggctatgcccgagagttcgccccacgctcagtcgcgccgccggcgcggaccgggccgagagaaccttgcctgcaaacagcaggctctgaacgactaaggaacataatatgattcttgatgcattctccctgcagggaaaagtggccgtcgtgagcggatgcgataccggtttaggtcaggggatggccctcgggctggcggaagcgggctgcgatattgtcggtatcaatatcgtcgaaccggtggagactatcgagcgggtaaccgcgctgggacgccgttttctcagcctgaccgccgacctgcgccagatcgacggtattcctcagcttctggagcgggcggtggcggagttcggccatattgatattctggtcaacaatgccggcctgattcgccgcgaggacgcgctggcgttcagcgaaaaagactgggacgacgtgatgaacctcaacatcaagagcgtattttttatgtcccaggcggcggcgaaacactttatcgcccagggcagcggcgggaagatcattaacatcgcctccatgctgtcgttccagggggggatccgcgtgccgtcgtataccgcatccaaaagcgcggtgatgggcgtcacccgcctgttggccaacgagtgggccaaacacaacatcaacgtcaacgccatcgccccggggtatatggcgaccaacaacacccagcagctgcgcgccgacgagcagcgtagcagcgaaatcctcgatcgcattcccgccgggcgctgggggctaccggccgatctgatggggccagtcgtgttccttgcctcctcagcctccgattacatcaatggctacacggtggcggtggacggcggctggctggcgcgctaaccgtccgcgatggccggggtctgtggtatcgctccggccttctgagcaattattgtccatacgcaaaagtgcggatcgtccatactcctgaacacaggtataatgttaccgctctgtataaacagggttattaactattggaaacgcattttttgttactttgaaagtttaatgtccatcacaaaacccatcctgccagcaatatagtccatatctttggcttatcctgcctgacccattcatccaccagtcacgtactttcgtcttatgtcttactctgtgtggcaggaaaaaaatgacttcaatcagtaacgactctacattatcgccgcggacgcaacgtgatacccggcggatgaactggtttgtttccatcgccgcggcggtggcgggcttgctttttggcctggatatcggcgtgatatccggagcgttgccctttataaccgaccatttcaccttatccagccagcttcaggagtgggtggttagcagcatgatgttgggggcggcgataggcgcgctgtttaacggctggctgtcgttccgccttggccgtaaatacagcctgatggcgggggccgtactctttgtggccggctctatcggatccgcttttgccgccagcgtggaggtgctgctggtggcccgcgtggtgttgggcgtggcagtcgggattgcctcttataccgcgccgctgtacctctccgagatggccagcgagaacgtgcgcgggaaaatgatcagtatgtatcagctgatggtcacccttggcattgtgctggcgtttctttccgataccgcctttagctacagcggtaactggcgcgccatgctgggcgtgctggcgctgccggcggtgatcctgatcattctggtcgtctttttgccgaacagcccgcgctggctggcggagaagggacgccatatcgaagcggaagaagtgctgcggatgctgcgcgatacctcggaaaaggcgcgcgacgagcttaacgagatccgtgagagcctcaagctgaagcagggcggttgggcgttgtttaaggtcaatcgtaacgtgcgccgggcggtgttcctgggcatgctgctgcaggcgatgcagcagttcaccggcatgaacatcatcatgtactatgcgccgcgtatctttaaaatggcgggctttaccactactgaacagcagatgatcgccaccctggtggtgggcctgacctttatgtttgccacctttattgcggtgttcacagtggataaagcgggccgcaagccagcgctgaaaatcggctttagcgtgatggcgctgggcactctggtgctgggctactgcctgatgcagttcgacaatggcaccgcatccagcggcctctcctggctctccgtcggcatgaccatgatgtgtattgccgggtatgcgatgagcgcggcgccggtagtgtggatcctctgctccgagatccagccgctaaaatgccgcgacttcggtatcacctgctcgaccaccaccaactgggtgtcgaacatgatcatcggcgccactttcctgacgctgcttgacgcgattggcgccgccggcaccttctggctctacacggcgctcaacgtggcctttatcggcatcaccttctggctgatcccggaaaccaagaatgtcaccctcgagcacattgagcgcaacctgatggcgggcgagaagctgcgcaacatcggtaatcgttaatgtgaggcgcgcggcaaccacgggctggcgactttgcgcgtctcccgatggttgtcgccgtgaatgatatgcagggcgctcaggcgcccgatgtcataatgcggcagttgcactgtggagagcggcggtagaaacagatcgccaatgcccaccatgttgtcgtatcccactaccgccacgtcctgtggaatgcgtaacccctggcccagcagcgtctgatagaccataaacgcgatgcgatcgttgccgcagatcactgagtcaaagccaggtttaccctcgcggatatgcgccagcaccaccgccgggatatcgtggtaatgctcatcgccctggcccatatacgaatggctcagatggtccggttcgataccggcctcccggcaggcgcgctccagccccaggcggcggcggatcgtcgccggctggctggcgggtaagtgcaggcacagcggacgacgatagccagcggcaagcagggctttcaccgcgtcgtactgcccctgttcatcgtccgggatatagctggccaccggctggctgaggctttcgcagttggccagcacgcagggcagagtcagcagtttttccggcagcggtacctggcgcaggcccatggtggtaaagataatgccgtccggacggtgggagaggagcaggtcgaccaccgcttccggacgatcgtcagaaaacatattgaccacaaagctgttccagccgtgggcgcgggccgtctcttcgatcgagagggtgatctccaccgaaaagggcgtggtgacggtatccagcgccagcacgccgatggtgctgggggtggcgcgcgccccgcggatcttcttcgccgacaggtcggggacgtagttggtctcggcgatggcggcctgcacgcgggccagtgtctcaggcttcagccgctccggggtgttcagcgcccgtgagacggtcatcagagatacattcgccagttttgctacatctttcagggacgccattttttcctccgccattgccgcagagtacaggctatacaactaagtcgctgatgtaaaagagtgaaacgattttctgctatcgccgtcgtgagctatgttgcggttgatttttgatcgcgatcgcatcttcattatgttaacgttaacttttgtgattaacatcatatatcgcagcgaatccacctgcgttttgttttttgttaacgttaccataattgcattcctctaacacgagaatgtcatgatgaaagcgcctcactcacacagctacccgttgctcagtgccttactatttttcttttttgtgacctggtcgtcatccggctccttgctctctatctggcttcaccaggaggttgggctgaaggcaggcgataccggtattatctatgccgtactgtcggtttccgcgctgtttgcgcaagtttgctatggatttatccaggacaagctggggctgcgcaaacatctgctctggtatatcaccgcgctgctgatcctctctggtccggcgtatctgctgttcggccacctgctgaaaatcaacgtcctgttgggcagcatttttggcgggatctatatcggtttgacctttaacggcggcatcggcgtgctggaatcttacaccgagagggtggcgcgtcagagccagtttgaattcggcagggcgcggatgtggggctcgctcggctgggcggtggccaccttcttcgccggcctgctgtttaacatcaatccgcagctaaacttcctcgtcgccagctgttccgggctggtgttctttatcctgttggcgcggctgcgggtctcctcggcgccgcatgcgatgcaggaggcggtatcgggcggtaaggtgaccctcgaagatgcgctgcgcctgctgacgctgccgcgcttttgggcgctggtcttcttcgtcatcggcacctgcatttacggcgtctatgaccagcagttcccggtctatttctcatcgcagttcgcgaccctgcaggaaggcaatgagatgtatggctacctcaactccttccaggtgttcctcgaggcggccggcatgttctgcgcgccgtggctggtgaaccgcatcggcgccaaaaacggtctgattttcgccggcatggtgatggcgatgcgcatggtggcctccggtctggtggaggggccgctgctgatctccatcaccaaactgctgcacgcggtggagttgccgatactgctggtggctatctttaagtacaacagcctcaacttcgataaacgtctctcctccaccctctatctggtgggcttcgcctgcaccagctcgattatcgccagcgtattgtcgccgctggcgggctacagctatgaaaaatatggcttcgcccagtcctacctgatcatgggcctgctggtgttctgcaccacctttatttccatcttcttgttgcgctccggcaaatcctccgccgatccgctggtgtcgcaacctaccgctatctgaatcaaaaagagtgaaaatgatgacttacacaatctcccgggctgaacaggtactccagacacaacgccaggcgctgaacctgcgctggtatccgcactatcacctggcggcccgcgccggatggatcaacgacccaaacggtctggtgtggttcgacggctggtaccatgccttttatcaacatcacccgtactccacccagtgggggccgatgcactgggggcacgcgcgcagtaaggatctggtgcactgggagcatttgccggtagccctggcgccggagggcccggaggataaagacggctgcttctccggctcggcggtggtcgatggcgataccctggcgctgatttacaccgggcataagttccacggcgatcctggcgacgaagccaatctgtatcaggtgcagtgtctggccaccagccgcgacgggatccactttgagcgccaggggatggtggtcgacaccccgccgggtatgcaccacttccgtgacccgaaggtctggcgtgagggagatagctggtacatgatcgtcggcgcgcgcgaaggcgataccggccaggtgcggctgtaccgttcagccgatctgcgccagtggcaggacgcgggggtgctggatgaagcggaaagcaccatgggctatatgtgggagtgcccggacttcttcaccctcaacggcaaacgcgttctgatgttttccccacaggggatgcaggccgcggggttcagcaaccgcaatctgttccagagcggctatctgatcggcgagtggcagccaggccagcgttttattcgccatggcgaattccgggagatggataacggccacgatttctatgccccgcaaagcttcgccacccccgatggccggcggatcgtgattggctggctggatatgtgggaatcgccgctgccggagcagcaggacggctgggcgggcatgctctccctgccgcgcgagctgagcctgagcgcggatgaccgcctgcagatgcgcccggcgaaagaagtggagagcctgcgcggcgcctggttcccgtggccggtcagcaccctgaacaaccagcagacgacgatggtcgacaactgcgaggcgatggaggtgaatctgcgctgggactgcgcccgcagcagcgccgagcagtatggtctgcgctttggcgatgggctgcgcatctacgtggatgcccaacagcagcgtctggtgctggaacggcattatccgcagtatggcctgtgcgggacgcgcagcgtgccgttgaccgccggggcggatctcaacctgcgaatatttttcgatagctcttcggtggaggtttttgtcaatgacggcgaagcctgcctgagcagccgtatctatccgcaggctccccgccgtgaattagcgttatttgcctggagcggcgcggcggcattaaccgaagccggcgcctggcagctcgaataataataaggctgttgtcgttaataacccgtctttgacgatgggcgggttattattgcctgcatcgtcgtgcgttacccattaataaaaaattcagttcattccataataaaagggtttaccgatgaataaaatctgggtcgggtgttttctgacgtctctgtatctgccatccgttatggcgcaggcgccgttatcgctggaggagcgactggcgcaaatggagcagcggctaaaggcgacggaggcgcgcgccgccagcgcagaggcggaaattaagacgctgaaaggccagcagcaggccgcgacggtcgcccgcgcggcgcctgcttcgccgcgtttgcagctaaatgacaatggcgaattaaaattttatggcgacgtcgaatttaacctcgatggcgccagtcgcaccggcagtctgacgtcggtcaaaaccagcgcgaataaaagctgggcgcccggcgataaagagcgctgggatattaacggtcgtattctgctgggtttcgatggcagacggaatggcgccgacgggcaatatgccggattcagcgtgcagcctctggcggatatggatggcaaaatgaatcttgatgatgcggtatttttcttcggccagcaggatgactggaaaataaaaataggccgctttgaagcctgggatatgttcccgctgaatcaggatacctttattgaatattcaggtaataccgccaacgatctctattccgatggctatggctatatttacatgatgaaagaggggcgcgggcgcagcagcagcggcggtaaccttctgtttagcaaaacggtggataactggtatttcgaagttaacaccctggtggaggacggcagttcgctgtttgtcgatcagaactatcatggtaacgcgctggaaaaccgcaaaaatgtggtgtacgtgcggccggtggcggcgtggcagtccggcgcctggtcggcggccgcggcgatagagagcaatctcgtcaacaatgcttacggctatcagagccagagcggacgctgggtcgaccagtcaaaccgcaccggctacgggctgaccatgagctggaacaccctgaaaagcgatccgcaggatggggcggtggtcaatctgagtaccgccctgctggacgcggcggacgaaaccgacttcagcgccgggatcaacgccctttggcatcgcgtggagctgggctatatctatgcgcacaataaaatcgaccagttcaatatggccggggtgaccagcgaatgcgatggcgattgcgctatcctggcgccggggcgctatgacatccataccctgcacacctcctggcagttgccgaatatcatggcgatgccgaacttcaatatttaccttggcgcctatgcctcgtggctcgattccacggcagcgaagagcgggaatcccgatgaacgctacggcgcccgggtgcgctttaaatatttcttctgacagggccttctggcagaccctcccgcggcgtgcgccgcgggagagttcagacgggcaggttagcgcatcgcgcggcgcagaatgcggtcggtctggcgctggaagtcctcggccgcttcttccaccgactttttaccgtagtcgatgtactgcagggtggtgccgaactgggcgacgatctgcggatcgtcgaagtacggggagaccggcagagcggtgggcagggattgcgccagcttcaggccggacaccgccggatcgtcggctttgattaccccatcctcggtcaggtaggtgaccgccgctttactcagcggcacgccgcgctccagtccaagaatatccaccccttctttgctgttcagcaggaagttaatcactttcgccgccgcctgcgggtttttcgtcgatttgccaatcgacaacatttgcgcgggcttgaagaacagtccagcatcggtggcgcccggcagcatcgggtattcccccagcaccagcttcgccggcggcttcaggttatcggaatatttgttgatggtggagttccacatgtaggtcccgccccattcgccctggatccacggcttcatttcgtacatgttgctcttgccgaaggaggcatagtagcgggtgtccggcatcacatggctgtcgataagcttcttatacataccgaagaaatccgcccactgcgctttgctgtaggagaattttcgccctttctcatcgatggccggctgattgtatttttgcaccatataagagttgagcagggccagcacgtcctggtgttcgagcaccaccgggtagtactgtttcccgagcttgctttcgaaagtttttcccgccgccatgagttcatcccaggttttcgggaaggggatgcccgcctttttccatgcttcgtcgttaaagtagaagacgcgggcggtgacggaaattggaataccgttaagcttgccgttgaccgtggtggactgcagttctttggcgtcgaactggctgaggtcgatctcgtctttcagggtattcagatcgtaaaagccatcgccatttttcgaaaagatcggcagccagttccagttggtctgcatcacgtcaggctcggtaccgccggcaatctgggtggtcaggcgtgaaagatggccgtcccagccggtgtattctgctttgacgttgatgtctgggttttgtttgtggaattcctccagcgccttgagggtgacctgatggcggccgttgcccccccaccaggacatacgcaggtcgacgtcctgcgctagcgaagagaaggcgctaaggcccagggtggcggagagggtggcgcttatcagcacgtttttcattgttatgctccagggttcacagagagaggttctgttcggttttggcgtcaaagatgtgacacttgttgagatcaaaggtgaaatagactttgcgattcagtcccttggcaatcatcggcttcgcatcgtccgacggcacgcgggcggtcagctcataatcagcaaccctgagataaacaaagaattcatgtcccatgttttctacgcgtaccatttcacccgcgcaggaaccttcggcaaacggttcatcggagagagagacaaactccgggcgcacgccaaagaacacctgctgattcttatgggtttcaactttgttttgcagccgatcgttgagcggcagccgctgatcgcccagcgtcaaatacaggcgaccaccgtgctcaaccagctggctgggacgaatattcatctccggcgcgccgataaacccggcgacaaacatatttttcggctggtggtagagattgtccggggtatcaacctgcataatgtggccgagcttcatcacgcagatgcggtcgcccatggtcatcgcttccgtctgatcgtgggtgacgtagacggtggtcgccggtttgccagattttttcaactgcttatgcagatcggaaatgcggatccgcatcgaggcgcgcagcttggcgtcaaggttggagagcggttcgtcgaacaggaagacgtccggttttttgacgatcgcccggcccaccgccacgcgctgcgcctggccgccggagagctggcgcggcaggcgatcgagcagttcttccagttcgagaattttcgccgcttcttccacctgtctgtcgatttgcgccttcggcagcttgcttagcttgaggccaaaggcgaggttttcgcgcaccgtcatatgcggatagagggcgtagttctggaacaccatcgcgatgccacgggatttaggcgccaggttgttgacgattttgtccccaatccgcacctcgccgccgctgatggtctccagacccgccagcatgcgcagggtggtcgatttggcgcagccggaggggccgacgatcaccataaattcgccatcggcaatcttcaggtcgataccatgcaccgctttaaacccgttggagtagactttttccagtttgttgaaaatcacttcagccatgatatttccctcttaacctttgattccgctgctggtcacgccctgcacgaagtagcgttgagccaggaagaagacaatgatggacggcagaatggagatgctcgccattgccagaatttcgttccacggcgcgccttccgtgacgtcgatagacatttttagcgccagcgcgatgggatacttatcgacgctgtagacgtagatcagcggaccgataaagtcgttcatcgaccacataaactggaacagcgccaccgagataatggccggcttgaggatcggcaccaccacataccacagcacctggatggagttgcagccgtcgatctgcgccgcctcttccatatcgcgcggcacgccgcgcagaaactggatcagcatgaagacgaagaatccctgggtggcgaaggccagcggcaggtacagcggcagatagctgttcagcatccccatttcgcggaacatcaggtactgcgggatcagcaggacggtgctcggcagcaacatggtggtgataagcgttgcgaaccagaacttcttccacgggatctcaaagcgtgcgaagccgtacgccacgatggtggaggaaatgatcgttaacaccactttcgggatcacatacttaaaggtgttcagcatatagtggccgaaatggtattcggtgccggtcttccagccgttgataaacccgtcccaggtggcgtgggcaggccacagcccgagggtggtgaagatctcatggttcggcttgaacgaggcggagaacatccacgccagcgggtagagcatcagcaggccgacgaatatcagcacgacgtagcgcaccacccggctcaccttttcccggcgcagcgtacgggcgacctcacgatcggcgtcgctcatcaccggcgccatctgttgaatatcagccatttttgcctcccttatcggcggagtagaagacccagtatttcgatgacttaaaggcgatcgacgcaaagaccgccacgacgaggaacagcacccacgccagcgcggcgccatagcccatgtcgaagtacttaaaggcggtatcgtagatatagagtgagaagaggtaggtgtaataggtcggaccgccgccggttatcacgtacgggccggtaaactcctggaacgcctgggtggtctgcataataaagttgaagaaaatcaccggggtgatcagcggcacggtgaccttcatgaacatctgccactttgaggcgccgtcaatcattgccgcctcatactgcgactgcggaacgttctgcagcgcggcgaggaagatgaccatcgcggagccaaactgccagacgcgcagcagggtgaccgacatcagcgccagggagggttcccccagccagttgatggcatcaatgccaaagacggcgagaaaactgttcagcaggccgtcaatggcgaacagggcgcgccacagcacggcaatcgccaccgagctgccaaggatcgacgggatgtaataggcggtgcggaaaaagccgatgccgcgcagtttgaaattgagcacaaaagcaatgccgagggcgaaagccagttttaaggggatggttaaaaagacgtaggcaaaggtcacccccatcgatttccagaacaggctatcctcggtcaacatatagcgatagttttcgatgccgttaaataccggcgggctcatcaagtcgtactcggtaaaactgagaaagaaagatgaaacaaagggaaaagcggtaaagacgatcagcccgatgatatagggcgatatccatgccaatcccagcagcttgttttcattcatacatacctacctggcttacgagttgtaatacggatccggtgacgccgcgctgtcggccttttacgcctgacaacgcaaaaatgtctgaacgcttcctctgcttaacatgtccttgttaattaatggggtattctttaactggtctagcaggtaagggctgtcagcccctttttttatgcggaactgttttttataaaacaccgttttaatttcattttattgcgatttgtttctgcgtcatgcagatcaggatggaaatgtgatcaaagtcgaaacgatgtttcaaaaaggtgaggtggtaagcattttggccgtaaagggcgtctgaaaggaatgaaaaattaggcttaactgagcgggaaatataattaccaggataatgattgtggccgcatctttttattgaagggcgccgggcagtaaccggggacggcgaacgcccccgttatggattagccttcaagaaaatcttcgcgaatgggagtaaaggtatcgagcagcgtgccgggctgcaggcagacgcaaccgtgcataatccccggccgcttatacaacgtatcgccggcgctgacgacgcgcgtctcctcgccgatggtgaactcgaactcgccggaaagcacgtaggtgagctgttcgtgaggatggttatgcatcgggccgacggcgccggcggcaaaattcacctccacggccatcattttgccgtcgtgggccagaatgcggcgggttacgccattgccgaggtcttcaagggtggtgtctttatgaaaaataaacatctggcgatcctgttgttaaagtgaaacattgtttcatttaacttatcccactcttcatgaaaaagaaatacgcggccagagaagtggaaagttgatcacaagtttgcttcactggcagaaacgacataaggagcagaagatgaaaaccattggcctgttaggcggcatgagctgggagtccacgatcccctattatcggttgatcaatgagggcgttaaggcgcgactgggcggcctgcactctgccagcctggtgctgcacagcgtcgattttcacgacatcgaagcctgccagtccgccggcgactgggatcgcgccggagagatccttgctgaggccgcggtcgggctgcagcaggcgggggccgaaggcattgtcctgtgcaccaacaccatgcataaagtcgcagatgccatcgccgcccgctgccaggttcccttcctgcatattgccgatgccaccggacgggcgattgccgccaaaggtcagcgccgggtcgcgctgctgggcacccgctataccatggagcagaccttttaccgcggtcgtctgcaggagcagtttgccatcgagacgctgatccctgaggctgacgatcgggcgcagatcaatcagatcatcttcgacgaactttgtctcggcaccttcagcgaggcgtcgcgggattattatctgcagacgatcgccgccctggcggagcagggggcggaaggggttattttcggctgtacggagattggcctgctggtgcctgccgagctcagcccgctgccggtctttgacaccgcggcgatccacgcggaagacgcggtcaactttatgctctctgcaggaccgacgccagcggcgtgaggatctgcggcagactctgctgcaggtgggcaacaaaggcgtcgaccagcgccgagcgcgggcggtggagggggcggatcaggctgacggtaaacggcacctcgacgctgaagcggcgcaccaccacgccgctatcggcatagtccagggcggttaacggattcaccaccgagatcccggcgccggcgcgcaccatggcgcagatcgaggccgcgctgtgggtttcgaccaccatccgccgtttaacctgatgctcaaggaacagggcgtcgagcagctggcgatagctgtcggtgcgcgacaggctgatatagttttcgccctgaaaatcggcgggggtcagcgtcgcctgcgccgccagcggatggccggcgggcagcacgcagacttcattcagcgtcagcagcggggtgcgttcggtgcccgcgggggtatgcagggtctccgtcaggccaaggtcatggcgctgggcggagagccactcctccagcagcggcgactcctgggggacgatctgcaggctgacctccgggtagcgagcgagaaacggcggcaacagcagcggcagaaaggactgggaaaacaccggcagacaggcgatcgacagctcgccctggcggaactcgcgcaggctctcggcggcgctgacgatacggtccaggccataccaggagcgctgaacctcctcaaacaaacgcaggccctgcaccgtcggctgcaggcgaccgcgggtccgctcaaacagctgcaggccgagcaccttctcaaagcgcgccagctcgcggctgaccgtgggttgcgaggtgtgcagcatcctcgccgcttcggtcaggttgccggtggtcatcaccgcgtgaaagatttcaatatgacgcaaattgacggctggcatgcggtctccgtgaggctcggctggaaccatatcatttttgcatagagtcgcgataaaacgatattttttattcgtctgtcactgtggcgtaatcagaaaaaacagcgaccaacacacgtactgcaccggagttcttatgccacactcgctttacgccaccgatactgacctgaccgcggacaacctgctgcgcctgccggcggaatttggctgcccggtctgggtctatgatgcgcagattattcgccgccagatagcccagctcagccagttcgacgtggtgcgttttgcgcaaaaagcctgctctaacattcatattctgcgtctgatgcgtgagcagggggtgaaggtggactcggtgtcgctgggggagatcgagcgggcgctggcggcaggctacgatccgcagcagaatcccgaggatatcgtcttcaccgccgatctgatcgacgacgccaccctcgatcgggtgaaggcgttacagatcccggtgaacgccggctcgatcgacatgctgagccagttgggcgaggtgtcgccgggccatcgcgtctggctgcgcgtcaacccgggctttggtcacggccacagccagaaaaccaataccggcggtgagaatagcaagcatggcatctggtacagccacctgccggcggcgctggaagtgatgcgtcgctatcagctgcagctgatcgggatccatatgcatatcggctctggcgttgactatggtcacctggagcaggtgtgcggcgcgatggtgcgccaggtcgtcgactttggccaggatctgcaggccatctccgccggcggcggtctgtcgattccttaccgcgaaggtgaagaggccatcgacaccgcccactattatggcctgtggaaccgcgcccgggagcagatcgcggcccatctggggcacccggtgaaactggagattgagccaggacgcttcctggtggccgagtccggcgtgctggtgtcgcaggtgcgcagcgtgaaagagatgggcagccgtcacttcgtgctgattgacgccggctttaacgacctgatgcgcccggcaatgtacggtagctatcaccatatcaccgctctggcgggggatggccgggatctcagcgccgcgccgcaggtcgaaaccgtggtggccgggccgctgtgcgaatccggggatgtctttacccagcaggaggggggcaaagtcgagacccgcctgctgccggcggtggcgcctggggattatctggtgctccatgacaccggcgcctacggggcttcgatgtcgtccaactataacagccgtccgctgctgccggaggtgctgtttgatggcggtaaggcgcggctgatccgccgtcgccagaccatccaggagctgctggccttagagcttatttaaaaaaaggtcccgtcgtcaccgactcgcgaagcaccagcgtgccggtaaacggcgggatcgtttctatcggctgctgattggcaagcttgatcgcctggtcgatagccgtagtgatcatgttgtcgatcggcagataaaccgtcgacagccccggctccagccatttcgcgcttggcgcatcgtcgaagccaaacagcgacacatcctgtggaatacgcagccccgcctgatgcagcgcctttgacgcccccagcgccatatcatcgttacaggaaaacagcgcgctgaagcgggctttctcgtccagcagttcccggcacagttcgtagccgcgggtcatcgtcgagtccccatacttcacccggctcggatcccactcaataccatgttttatcagcgcgttgcggtagccctgcaggcgagcctggccggtaggggtatgcatcgggacggtgatgcaggcgatatcgcggtggccctgggtaatcagatactccacggcctggaaggcggcttcctgctgttcgaagaacacgcagcgttcgcgggcctgcgccacatcgcggttaatcaccaccagcggcatggcgatcgagttaatcagcgacatgatcgccttctcgctcatgtgccgggtatagaggatgatcgcatcgcactgccggtcggcgagcatctgcaccgcttcctcttcgcgctccggcgtatcatggccgtcggtgacgataagctgctttccccaggcttcggtctggcgtgacgcctgctgcagcagacggccaaagtaaaagccgtcaaaggtggagacgaccagcccgatactattgctggtctgattggccagcgagcgggcaaggaaattgggccggtagcccagctcttccatcgctttaaagacctgttgacgggtgctctctttcacctgacctgtgccgttcaacacgcgggaaaccgtcgctttcgagacgcctgcgcgaattgagacatccagcattgtagccattcatcgattcctgatttcacgtggtaaagcgcagtttatcacagaccgaaaagggacatatcgacggggcggggcggaaaaaccatcgcgatcacgcttttggcaggaactgacgagccgacagactctggtatgccaatgtcgattttatcggatatttgggataccactgtgcgcgttgcgagcgctgtcacagaactatttttgcctggcgactatgttttggtatgccaaaagtctctggctgttcacctggccgcattaagccctttacactgaggtactcttttatggcattacaggacaaactgatcgacgcgctggggcgtttcgcgacgacattcaacagctatcgctacattatggcgatcaaatcggcgtttattaccctgatgccggtgatcatcgtcggggccttttcggtgctgatctccaatatggtgctggatccgaaaaatgggctcgccagcttttcctcgctctcctttcttgcggcgctgaagccgatcaccagcgcgcttaactacgctacgctcaacttcctcaatatcggcgccgtgtttctgatcggtattgagctggggcggatcaacggcatcaaaagcctgtttcccggcctgttggcggtgatctgctttatctgcgtcacgccgaccacggtggagatgatggtcgatggccagatgcacgtggtgaaagatgtcctgctgcgccagttttccgatacccgcagtctgttccttgggatgttcatcgccattctgtcagtggagatttactgctggctggaggggcgcaagggactgaagatcaaaatgccggataccgtgccgccgaacgtctctgcctctttttccgcgctgatcccggcgatcatcaccaccaccgcgatcgccacctttggttttctctttcaccagctgacgggaatgtatctctacgatgcggtctaccaggtggtgcagcagccgctggagcgggtggtgcagagcctgccggggatcctgctgctgatgttcgtcgcccagctgttctgggtgatcggcattcacggcaaccagatgatcaagccgatccgcgagccgctgctgctgggagcgatcaccgtcaatatgagcgcttttgagcaggggaaagaggtaccgaacatcatcacgatgcccttctgggatgtctacatgagcatcggcggctcggggctgaccatcggcctgctgattgcggtgatgatcgccaccaggcgcaaagagatgaaagagatcgccaagctgtcgataggcccggggctgttcaatattaacgagccggtgatcttcgggatgccgatcatgcttaacccgatcctcgccatcccgtttatcatcaccccgctggtgaccggcagcatcggctatttcgccaccctgaccggcttcgccggcaaggcggtggtgatggtcccctggaccacgccgccgctgatcaacgcctggctctccaccgccggctcgatgggggcggtggtgacccagcttatctgcatcgtcgtcgcggtgcttatctatctgcctttcgtcaaaatcgcctcccgccgtgccgatgccgcgcagcgtcaggtagacaatcaacaaaccgccaaccctgtctgaggagcctatgactaccgtacggatgaccattcccgatgattttatccttggcgcggcggcttccgcctggcagaccgaaggctggagcgggaaaaaaccagggcaggactcctggcccgatctctggtacaaaaacgatcgccacgtctggcataacggctatggcccggcggtggccaccgattttatcaaccgctttcaggaagatgtgcagctgatgaagctggccgggctgacccactaccgcacctcaatcaactggtcgcgctttctgaccgactacgaaaacgtcacggtggatgaggagtatgcggcctattacgaccagctgttcgatgcgctgctggccaacggcatcacgccgatgatctgccttgagcattatgaattgcccggctatctgctggaaaagtatggcggctgggggtcgaaaacggtggttgagctgtttgtgcgctacgcggagaaggtgtttgcccgctaccacccgaaggtgacgcgctggtttacctttaatgagccaattgtggtgcagacccgggtctatctggatgctctgcgctggccctatgagcagaacaccagcacctggatgcagtggaactatcataaggtgctggcgaccgccagcgtcgtgaagcggtttcgcgagctcggctatcccgggaccgtcggctgcatcctcaatccggaggtgacctacccacgctcacgcgccccccatgacctgcgcgcggcggagatctacgatctgttctacaaccgcatgttcctcgacccgctggtgcacggcgtctggccgccggagcttctcgcgctgcttgagcagcatcaggtgacgtgggagaccagcgaggaggatctggcggttatccgcgagcacaccgtcgatgagctggggattaatctttactacccgcaccgggtcaaagccccgtcgcgggcctggcatccgcacaccccgttccatccggcctggtattatgagccgtttgagctgcccggccggcggatgaacgcctcccgcggctgggaaatctacccgcaaatcatctttgatatggcgatgcggataaaaaatgactatcgcaacatcccgtggttcgtggcggagagcgggatgggggtggaaaacgaaggccagttccgtaaccgcgaaggcgtcatcgatgacagctaccgcattcgttttatcagcgaacatctgtggcacaccctgcgcgcccgcgaggcaggggccaactgccagggctatatgctgtgggcgtttaccgacaacgtatcgccgatgaacgcctttaaaaaccgctacgggcttatcgaaatcgatctgcaaaaccatcgcgcccggcgacccaaagcctcggcgcactggtttcgtcaactgggcgaacggcgtgaactggtgctggatatcgatgatgaataccgctagccgggggcaatatttgctaagatagcggcgtatttgactcgcaggcatgtaacgcacaggtgattttgtggaaaaagcgatagttccgccggaaaagaagccctatcaggagattggtgatgacctgcgcgcccagatcgcgcaggggcgctacccggtcgggtcgcgtttgccgccggaacgccatattgccgaaacctatggcgtcagccggaccatcgtgcgcgaagcgctgctgatgctggagctgcaggggacggtggatattcgtcagggatccggggtgtatgtcatgcgcattccccacgagaacgacagcgaagaggagcagctgctcagcagcgacgtcggcccgtttgaaattctccaggcgcgccagctgctggagagcaacatcgccgcctttgccgcgaaaatggccacccgcgccgatatcgacaatctgaagcggattattgaacaggagcagcgggcaatcgctctcaacgacaccgcgcaggataacgctcgtctgttccatctggtgctcgccggggcgacgcagaaccagatgctgttggcgacggtagagcggatctggctgcagatggacagcagcccgctgtggcagcagttcaatgtgcatattgccagccgcgcctggcggctgaaatggctcggcgaccggcagactctgctcgccgcgctgcggcgtcgcgatgtgatgggcgcctggcaggcgatgtggcagcatctggaaaacgtcaaaaacagcctgctggagctttccgatgaggacgcccccgactttgacggctatctgttcgactcagtgccgatttttcaggggaagctggtatgacgatcctgccgctgtacgctgcgccgcagtacgtcccgcaggtgaccgactggttgtggcaggcctttggcggcgagacgctgccgcggcaattcttcgccagcatcgtgcagcatagccagacggcggaggcgctgccgttgacctttattgcggtggaaggcgagcagttgctcggcacgattggcctctggcgctgcgatttgatcagccgccaggatctgtttccctggctggcggcgctgtacgtcgcgcccgccgcccgcggtcaggggctggccggaaaactgcagcggcatgtgatcgattatgcccgcctcgcgggctttcgggagctctatctctactccgcctgccgggatttctatgaacgcttcggctggcgctacatcggcgagggactggattacccggccaccgccgtgcacctctatcgctatgacttatcgccttcctgcggggcgaccaccgagtgacgacggaccagcgtcgggctgaacagatgggtgatctccggcgccggccgttgctccgccagggctaaagccagctcggccgcctgggtcgccatcgtaacgatcggatagcggacggtagtcaaccgcgggcggacatagcgcgaaatcaggacatcgtcgaagccaatcagcgaaatctcccgcggaacgtcgatgccattgtcattcagcacccccatcgcgccggcggccatcgagtcgttatagcaggcgacggcgctaaagtggcggccgcggccaagcagttcggtcatcgcctgttcgccgccgctttcatccggctcggcaaacgtgaccagccggtcgttgcacggcaggccgctctcctccagcgccgcgtagtacccctgcagccgatcttccgcatcggagatatcatggtttgagcacagatagccgatacgcgtgtgcccctgctggatcaaatggcgggtcgccagccaggcgccgtagcggtcgtccagcgccacgcagcgggtttcatatccgggcaggatgcggttgatcagcaccatgccggggatctgtttcattaaccccgccagttcctcatcggggatcattttggcgtgcaccaccagcgccgcgcagcgatggcggatcagctgctctatcgcctggcgctccttctgcacgttgtggtagccattgccaatcagcaaaaaattgccggtgcggtaggccacctgttcgacggctttgaccatcgcgccgaagaaggggtcggagacatcgcccaccaccaggccgacggtttccgttgactgctgggccagcgcccgggcgttcgcgttggggtgatagttcagggtttccatcgccgcgcccacggactgacgcgaggcttcgctggctttgggagagttgttgatgacgcgggagacggtagcgacggagactcctgcgagtcgggctacatccttaatagtcgccataccatgccttttctagggtaagcgtttacatactgctatgttacgggaaagagcggcagattcaaggcgcggcggcgaaggaatggcgcaaatgtgattcagcgcgggcttatcggtgacctgtttacattgacgcgatcggtaattgaaaccggcgcagggaaatacaaacctttgcttacactttgcgatgcgctgttgcgaatgttcgctggtttgttcgcggatccggttgatattctggctatcccagaggtattgataggtggagtcaacgtcacgttgaccactttacttacaccagcctgcgcagatgcgcaggtttttttttgcccgctatcggcgttgttacagatagcgaaaatcgtaatacctcgttgcacttaggctcactcccttgcgttttcccgctggcccgttacggccaaaaaacgtgacaatcgagatcccagaggtattgataggtgagtttctcaggtacgctcttcgtactgaacgtcttacaccgacctgcgcggatgcgcaggttttttttattccgaaaatccccccgctgcactgctttcccatgccttctcgtgtaacctgctttgactcatcaaccggtcacatggagttgttatgcttttgggatttttcagactgctgttcaaggggttataccgggtcagactgaccggcgacacgcaggctttataccagcaaaaggtcttaatcaccccgaaccacgtctctttcctcgacggcattctgctggcgctgtttttgccggtccgaccggtttttgcggtctatacctcaatcagccagcgctggtttatgcgcgcgctgacgccgattatcgattttgtgccgctggacccgaccaagccgatgtcgatcaaacatctggtgcgcctgattgagcaggggcggccggtggttattttcccggaagggcgaatttcggtcagcggctcgctgatgaaaatttatgacggcgccgcctttgtcgccgccaaatcgcaggcgaccattgtgccgctgcgtattgaaggcgccgaactgacacccttcagccggctgaaggggctggtgaaacgtcgcctgttcccgcgtattcagctgcatctcctgccgcccacccatctgccgatgcccgaggcgccgcgcgcccgcgaccggcggaagatcgccggggagatgctgcaccagatcatgatggaagcccggatggcggtgcgcccgcgggaaaccctgtatgagtcgctgctggcggcgcaggaccgcttcggcgcgcgcaaaccctgcgtggaggatatcaacttccagccggatacctatcgcaagctgctgaccaaaaccctgtttgtcgcccgcattctggaaaaatacagccagccgggcgagaagatcggcctgatgctgcctaacgccggcatcagcgcggcggtgattttcggcgctatcgcccgcgggcgtattccggcgatgatgaactataccgccggggtgaaagggctcagcagcgcgatagccgccgcggagctcaacaccattttcacctcgcgcaccttcctcgataaaggcaaactctggcacctgccggagcagctgacccaggtgcgctgggtattcctggaagatcttaaaggcgatatcaccctcgctgacaaactgtggatttttgctcatctgctggcgccgcgtctggcgcaggttaagcagcagccggaagacgcggcgatgatcctcttcacctccggttccgagggcaatccgaaaggggtggtgcacagccataagagtctgctgtccaacgtcgagcagatcaaaactatcgccgactttaccgccaatgaccgctttatgtcggcgctgccgctgttccactcttttggcctcaccgtcggcctgctgacgccgctgcttaccggggcggaagtgtttctctatcccagcccgctgcactatcgcgtggtgccggagctggtctacgatcgcaactgtacggtgctgttcggcacttcgaccttcctcgccaactatgcccgtttcgccaatccgtacgatttctaccgcctgcgctacgtggtcgccggggcggagaagctgcaggagagcaccaaacagctgtggcaggataaattcggcctgcgcattctcgaaggctatggcgtgaccgagtgcgcgccggtggtctcgattaacgtgccgatggcggcgaaggtcggcaccgtgggccgcatcctgccggggatggacgcccgcctgctggcgatgccaggcattgatcaaggggggcggctgcagctgaaagggccgaacatcatgaaaggctacctgcgggtggaaaaccccggcgtgctggaagcgcctgcggcggaaaaccagcacggcgagatggaagcgggctggtatgacaccggggatatcgttaccttcgacgagcagggctatgtccgcattcagggccgcgcgaagcgcttcgccaaaatcgccggcgagatgatctccctcgagatggtggagcaggtggccctcggcgcgtcgccggacaaaatgcacgccacggcgattaaacaggacgccagcaaaggcgaggcgttggtgctgtttaccaccgataatgaactgactcgtgaagccctgctgcgctacgcccgccagcacggcgtaccggagctggcggtgccgcgagatatacgctggctgaaacagctaccggtgctcggcagcggcaagccagactatgtcaccctgaaaaatatggtcgacgaggcggaaacaacccatgagtgagtcagtacatactaacccttcgctgtactcgaaagggatggtggcggtgatctgcgcccagttcctgtcggccttcggcgacaatgcgcttctcttcgccaccctggcgctgatgaagcagctctattatccggagtggagccagccggtcctgcagatgttgtttgtgggcgcttacatcctctttgccccctttgtcggccagttcgccgatagctttgccaaaggccgggtgatgatggtggccaacggcctgaaactgctcggcgccggctgcatctgcttcggcgtcaatccgtttatcggctatacgctggtggggattggcgccgccgcctattcgccggccaagtatggcattctcggcgaactcaccaccggcgataagttagtgaaggctaacggactgatggagtcctcgaccatcgcggcgatcctgctgggctccatggccggcgggatcctcgccgactggcacgtgctggcggcgctgatcgtctgcgcgctggtctacggcggggcggtagtggctaacctgtggatacccaggctgccggcggcgcgtccggggcagtcgtggcgttttaagccaatgacgcacagcttcttcagcgcctgccggacgctgtggcgcaacggcgaaacccgcttttcgctgatgggcaccagcctgttctggggcgctggcgtgaccttgcgtttcctgctggtgatctgggtgccggtggcgctgggcattaccagcaacgccatgcccacctatcttaatgcgatggtggcggtggggattgtgctgggtgccggggcggcggcgaagctggtgaccctggagacggtgtcgcgctgtatgccggccgggattttgatcggtatcgcggtgatagcctttgcggtgcagcagtcgctgctgccggcgttcggtctgctgctgctgctcggggtgttcggcgggttctttatcgtaccgctgaacgcgctgctgcaggagcgtgggaaacattcggtcggggcaggtaacgccattgcggtacagaacctcggtgagaacgtggcgatgctgctgatgctggggctctattccctggcggtgagcgtgggcgttccaccggtcgccgtggggataggctttggcgcggtattcgccgtggccatcgccgcgctgtgggtctgggggcggcgtaaataacctcccggcttacgctgcgcttgactgggcgagggggtcgccaatatctgctcttcggtagcccgggtaaggcgtatacgccgctacccggggctttgcttttttacggcgccgggtaggtataaacctgatgcaccgcctcaatctccgctaatacctcttcgctcagctcaagctgcaaactttccacgttggcctgcagctgcgtcatggtcgtcgcccccagcagggtgctggcgacaaacggctgccgacgcacaaaggccagcgccatttgcgccggatcgaggccgtggcgtttggcgatatccacataggccgctaccgctttctgcgactgctcgctgctgtagcgcgtaaagcggctgaacagcgtattgcgcgcccccgccggcttcgcaccgttgagatacttgccggtcagtgtgccgaaagccaggcaagagtaggccagcagctccacgccttcgaactgactcacttccgcgaggccgacttcaaagctgcggttcagcaggctgtaaggattctgaatagtcacgatccgcgggaggtcgtgcttatccgccaggtgcagataacgcatcacgccgaaggcggtttcgttcgacacgccgatgtagcggatcttcccggcgcgctggaactcggtcagcgcttcgagggtatccagcagcgtcacggcgggcgcggcgtcggcccaggtatagcccagcttgccaaagcagttggttggccgctgcggccagtgaacctgatataaatcgagataatcggtctgcagccgcttcaggctggcgtgcagcgcctcgcggatatttttgcggtccaggacgtgattgggccgaatgctgctgtcgttattgcgcgcgggcccgctgactttggaggcgagcaccagcttttcgcgattgccgcgtttcgccagccagttgccgacgtaggtttcagtcagcccctgggtttccgggcgcggcgggaccgggtacatttcagcgacatcgatcaggttgatgccgttggcaaccgcgtaatcgagctgctggtgggcatcggcctcgctattctgttcgccaaaagtcatggttcccagcccgagggtgctgatttcaagagaactgtgtgggatacggtgatactgcatagccagcttcctttttatttataaggtcaggcattccccgacaaaggagtatcaacatggcagagggtgagaaaaagaggaagtaaaaaatcaaaaaagccgggtgacgaggaggggcggtgggtgaaacccgcggcgtcctggtatatcccgactcttctcaaaagactggtggtcggtaagcgcagcgtcaacagaagctggggccgacagggaaagattaacgcttaatgatttgcgaaacgtcgtcacgattgatctgcattttattaccctgctgatcttcgtaactgattaaaccggtatcgtcatccacggtaggtttaccgtcggtcaggatcattcgcccatctttggtcgccatgacgtaatcgctgctgcaaccggaaaccgagaacgccagtcctacggcggaaatcaatactgcccatttcttcatcgtcaacacctcttcagtagctgcaccccatacccgtctattaatagcctgatttgtgagacataaaaagcagtaaagtctgaaaaagggttgcagcctgtgaccaggctgcaattttgtggtttacagcgggtttttcttattacgcagcaggttaaggctctccaccgcgatagagaagaacatggcgaaatagatgtatcccttcggcacatggacgtcgaagctttccagcatcagggtaaagccgacgaggatcagaaacgacagcgccagcattttcaccgaaggatgacggtcaacaaaatcgccgatgggtcgcgcggcgaacatcatcacccccaccgcgatcaccactgccgccatcatgatgaacagatgatccgacaggccgacggcggtgatcactgaatcgaggctaaagatgatatccagcagcatgatctgcacgatggcgccgaggaaggagtggacgttggtcttcagcccctcctcttcaccttcgatagattcatggatctctttactggctttccagataaggaatagcccaccgagcagcaagatcagatcgcgaaacgagatctcctgaccgaaaacggtaaagagcgggttggtaagcttaacgacccaggcgattgaggccagcagcgccagacgcatgaccatcgcgcccatcaaaccgatccggcgcgcatgggcgcgctgggcggtggggagcttagccacgaccagagagaggaaaataatattgtcgatcccgagcacgatctccagcagcgtcaatgtgcccagcgccagccaggcgttaggatcggttatccatgcaaataacattgttcaaagtcctgcaaaatagaaagcagcaattatatgcaacccccaacgcagaacaaaaaattaatcgtgttgtaacaagaaatggcgggcaagcagagcggcggtaaaattctttttcagatagaaaccgcgcggcagcgtgaggattgtctccccgcgggcaccgatggcttcggtcagcgccttgctgttggcggctttcggtcttaactgcagcacctcgccgtggcgggcggtaatgcgctctacctcaccgagaacaatgagatccatcagctcttcccagtccatgcgcagctggcgctcctcgtcttcgtccgggctccacagcagcggtgcgccgacgcgccgcgccgccagcgggatggtgcgttcaccctccaccgggatccacaggacgcgctgcagcttatgccgtacatggctgctctcccaggtgacgccgctattgccggttaacggggcgacgcagacgaaagtggtctccagcgggcgtccccggctgtcgatggggatcgttttgagctcgacccccagcgcggcgaaatcctgctcgggtttactgcctgcgctggcgcccagccacagctccagcagaatgcccgtccagcctttatcgcgcttcagatcgcgcggaatggggatccccgccagcgccgccagctcgcccagcgaatagccggccagctggcgggcctgggccaacagctgttcctgactttgcggcggtgaggcgagcggagcgatagcgggcatagggcaatacctttggttaaaaagtgagcgctaattttgcgcgttgtggatagagtttaccgttttctgagtaactataccaatctcatgatttatatggctttttaaactcatcatgcggcttatgaaaacggtgtaaacgggttttccagaactggtcactgacaataaacaggatcttacaccatgttatccacagaaaagtgggataactggggaaaagactcactactggttcgatttacagccttgacgtgcgacgaaaatcgaatttttagagaaaatctgccggtggcctgcgcgtaatctgtggataaaatcgacattgctcgatctttcatcagtcggcagatcgcatgtgtgatgatcgtcacgttatgctgtaatgtgtgaaaggaatatattctaactttatgaatatgatactattattttcagatgctagcgatgcgatgttcggattactctgggttttcccgggttaattccgtacttcttcacaactctatccacagaaaaagtgaataaaatcggctgtcacgcgctttcattgtttataactctggcaattactgtgagttattcaaatgttatccgttctcagtgtgcgaacagagtggtttaccgtttccggcgagtgtgaaacaatcattcacattgaagcttatcttgaggtagtccggtgattgatgacgatggctaccgcccaaatgtcggtattgtaatctgtaatcgtcagggccaggtgatgtgggcccggcgctatggtcagcactcgtggcagttcccgcaagggggcattaatccaggagaatccgcagagcaggcgatgtatcgggaattgtttgaagaggtcgggttaagccgtaaagatgtgcggatcctggcctcaacccgtaactggctgcgttacaagttgcctaaacgtttggtgcgttgggacacaaagccggtttgtatcggccagaaacaaaagtggtttcttttgcagttgatcggcaacgatgcggacatcaatatgcaaaccagcagtacacctgaatttgatggttggcgctgggtgagttactggtacccggttcgccaggtggtgtcgtttaagcgcgacgtctaccgccgggtgatgaaagagttcgccagcgtgaccatgtcgctggcggagagcgcacctaagccgcaaaacgcgcctgcttatcgacgtaaaagaggttaagccacgcacattatgctcactcggttgcgagaaatagtcgagaaggtcgcgagcgcgccgcgtttaaacgaggcgctggatattctggtgacggatgtctgccaggcgatggagacggaagtctgctcggtttacctggctgacaatgaccgacgctgctattacctgatggccacccgcgggttaaaaaaacctcgcgggcgcaccgttgcgctggcgttcgatgaaggcctggtggggctggttggccgcctggcggaacccatcaacctcgccgatgcgcaaaaacaccccagcttcaaatatatccccgccgtcaaagaggaccgcttccgcgccttccttggcgtgccgatcattcagcgccgccagctgctgggcgtgctggtggtccagcagcgcgagctgcgtcagtttgatgaaagcgaagagtctttcctcgtcaccctcgccacccagatggcggcgatcctctcccagtcccagctgaacgccctgttcggccagtatcgtcaaacgcgcattcgcgctctgccggcctcttccggggtggcgatcgccgagggctggatggacgtcagcctgccgctgatggagcaggtgtatgaagcctcgacgctggacaccgcctcggaacgcgaacgcctgaccggtgcgctggaagaggcggccaacgagtttcgtcgctacagcaaacgctacgccgccggggcgcaaaaagagacggcggcgatcttcgatctctactcgcacctgctctctgacgcccgcctgcgtcgcgagctgtttgccgaagttgacaaaggcgccgtcgccgagtgggccgtcaaaaagatcattgagaagttcgccgaacagtttgccgcgctgagcgacggctatttgaaagagcgggccggcgatctgcgtaccctgggccagcgtctgctgttccatctcgacgacagtattcaggggcccaacacctggccggcgcgcattatcctcgtggcggacgagctgtcggccaccaccctcgccgaagtgccgcaggatcgcctggccggcgtggtggtgcgcgatggcgccgccaactcccatgccgctattatggtgcgggccctcggcatcccaacggtgatgggcgccgatattcagccctcgctgctgcatggccatacgctgattgtcgatggctatcgcggtgagctgctggtggatcctgaacctgtcctgttgcaggagtatcagcgccttatcagcgaagagaacgaactcagccgcctggcggaggacgatctccagcgcgcgtcggagctgaaaagcggcgagcgagtgaaagtcatgcttaacgccggcttaagcccggagcacgaagagaagctcggcagctttgttgacggcattggcctctaccgcaccgaaattccctttatgctgcagagcggcttcccctcagaagaggagcaggtcgcccagtatcagggcatgctgcagatgtttaacagcaaaccggtgaccctgcgtaccctggacatcggcgcggataaacagctgccgtatatgccaatcagcgaagagaacccgtgcctcggctggcgcgggatccgcatcaccctcgatcagccggagatctttttgatccaggtgcgggcgatgctgcgcgccaacgccgccaccggcaacctcagcattttgctgccgatggtgaccagtctggaggaggtggatgaggcccgtcggctgatcgatcgcgccagccgggaagtggaagagatgatcggctacgccatcccacgtccgcgcctgggggtgatgctggaggtcccgtcgatggtctttatgctgccgcagctggccagccggatcgattttatctcggtagggacgaacgacctgacccagtacctgctggccgtcgaccgcaacaatacccgggtcgccagcatgtatgacagcctgcatcctgcggtattgcgggcgctggcgatgatcgcccatgacgcggagcgctttggcatcgatctgcgcctgtgcggcgagatggcgggcgacccaatgtgcgtgacgatccttatcggcctcggttaccgccatctgtcgatgaacggccgctcggtggcgagggtgaagtatctgctgcgccgcattgatatcgaagaggcgcaggagctgtcgcgtcgcagcctcgatgcgcagatgaccgccgaggtgcgccatcaggtggcggcctttatggagcgtcgcggtctcggcggcctgatccgcggcgggcggtagcgccagcccgggtgaggcgtaagccgtaacccggggatcctctgctcgcaccctccggcaaagtagggtaccgccgggaaaacggcattctgttagcatccgtatacatatcttttacacgttcggcgcggatcgctcttgtggcttatgctatgattcgcctccttcggcgtgcccgttttgttcgggtatggatcatcaccgctgtccactttcggcggaataacaagtctttatggtgacagatgaatagtggctacctgcattttccggagttcgatccggtcattttttctctaggcccggtctccctccactggtacggtttgatgtacctggtgggctttgtctttgcgatgtggctggccacccgtcgggcgaatcgtccgggcagcggctggacgaaaaatgaagtggaaaacctgctctacgcgggcttcctcggcgtcttcctgggcggccgtatcggctacgtgctgttttacaacctgccggtatttcttgccgatccgctgtatctgttccgcgtctgggacggcggcatgtcgttccacggcggcctgatcggcgtgatcctggtgatgattatcttcgccagacgcaccaaacgcaccttcttccaggtctccgattttatcgcgccgctgatcccgtttggtcttggcgccgggcgtctgggcaactttatcaacggcgagctgtggggccgcgtagacccgagcttccactacacgatgattttcccgggctcccgtgccgaagacctggcgctgctgccgacgcatccggaatggcaatcgctgttcgatacctacggcgcgctgccgcgtcacgcgtcgcagctgtacgagctggcgctggaaggcgtggtactgttcctgatcctcaacctgtttatccgtaaaccgcgcccgaccggctccgtttccggtctgttcctgattggctacggcctgttccgcatcatcgtggaattcttccgccagcccgacgcccagttcaccggcggctgggtgcagtacatcagtatggggcagattctttcgatcccgatggtgcttgcgggtatcattatgatggtttgggcttaccgccaccgtccgcagcaacagaattcttgaggaaccatgaaacagtatcttgatttgatgcagaaagtgctcaccgagggcacgccaaaaaatgaccgcaccggcactggcacgatctccattttcggccatcagatgcgttttaacctgcaggaaggcttcccgctggtgaccaccaagcgctgtcatttacgctccatcatccatgaactgctgtggttcctgcagggcgacaccaacatcgcctatctgcatgagaacaacgtcaccatctgggacgagtgggcggatgagaatggcgacctggggccggtctacggcaaacagtggcgttcctggcctgcgccggacggccgccatatagaccagatcagcacggtgatgaaccagctgaaaaacgacccggactcccgccggatcatcgtctcggcatggaacgtcggcgagctggataaaatggcgctggcgccgtgccacgccttcttccagttctacgtcgccgacggcaagctctcctgccagctgtatcagcgttcctgcgatgtgttcctcggcctgccgttcaatatcgccagctacgcgctgctggtgcatatggtggcgcagcagtgcgatctgcaggtcggtgatttcgtctggaccggcggagacacccatctgtacagcaaccatcttgagcagaccaacctgcagctaagccgcgaaccgcgtccgctgccgaagctggtcatcaaacgcaagccggcgtcgatcttcgactaccgctttgaagacttcgagattgaaggttacgatccgcacccgggcattaaagcgccggtggcgatttaaccccccagcagagatgactaaccggcgcccgatggcgccggtttttttatgcccttcgcaccacccgatgggagcgctttccgttaccaccgggagaaggttgttttcacctgccccccaggccacaggtggttgcggtgggcgaagttgggtagacgttcgcaaaaaaatgttcttctgtcgagtatgcaaagcttttttgcgtatctggccgggaaagctattttccgtcgtcgcgccagggccaatcgccgcggcatactcgacgccatgaacagagaacatggctacaccctgatggaaaccctggtaacgctgacactgatgatgctcctcagcgtcggcggcctgtacggctggcagcgctggcagcagcagcaacgactgtggcaaaccgccgtccaggtgcgggattttctgctctttctgcgcgatgacgccaacgcctacaaccgggaccgcgtgcttcgcgtcggccaggacgaagtgggctggtgcctgagcgcggagggggaggggcctgactgcgcctcggggacatccttcacgctgcgcccgcgctggccggggatcacgctggctggcgttacgcctggtctggggttttatggtctgcgcagcaccgcctgggcggggaatctgcggctgcagagcgcggccggcagctggagcattgtgatctcacactgggggcggattcgtttatgccgcagcgacagcgcaggagggtgtcagtgagccgccgcggattttccctggcggaggcgcttatcgccatggccatcggctcgctgctgccgatgggggcctgccgctttctgcctgccctgcagcgtcatattctgcgccagggcgaacagctggccctggagaacgagctgtggcagcgtgtgcatgccgtgggaaaacatctgcagcgcgccgggtactgccggggagcgtgcggcggagccgggctggagctagccgctggcggcgagtgtctgattgtgcgctgggatgcgaacagcaacgggagatgggaaacctcccccgcggcagcggcggagagcaccggctttcgcctgcgcgacggcgcgctggagaccctgcgcggggccagcgactgccgcggcggcggatgggagaaaatcaccaacccggccgccatcgtggtgacgcgcttctcggtacaacgtcaggtcaccccgggcttcgcgccggagctgagcgtgacgctggcggcgcgctccgcgcaacagacgggcctgacgagcgaggttgagcagcgggtgacggggtataacctgtgatccgccagcgtggaatgtcgtcgctgctgatggtgctcctgttgctgaccctcggcagcctgttactcgaggggcttaacctgcagcagcgggcgctgctggcgcaaaccgccagcgaaacgcaagcgatccgcgatacggcgatagcccattccgcgctgcagtggggaaaacagcaggtctggtcggcgcaggtggcgctggcctgccgggagcaggcgccgcagggctggcgcgcctgtctgcgtatcttcggcgacggttcactggtgctcagcagcgccagcggcgaggtgcaggtctggcagtccggcgaggtgcgcggcgggcaggtgcgtttttccgcccacggctggagcgatttttgcccgctcagggaggcgagcttatgtcaaatgccctgaagcgtcagcgggggtttagcctgccggagaccgtgctggcgatggcgctgatggtgctgacggtcaccgcgctgggcggctatcagcgcggaatggcgcaaggaattgtccagttgaaccagacccgtcaactgtggcgcgacgcgtggcgctatagccagctctccgcgccgccgtcgccggcacgcgggcaggtaagccgtatgcagacatcgaggcaaagatgtgtcagcatcacggtaacgatcagtagacccgttgcaaagcgggtgcagatgacccggctgcattgcccggtcagccagtagtcaggagcaattatgttaagggtataccactcaaaccggctggatgttctcgaggcgttgatggagtttatcgtcgagcgccagcggctggatgacccttttcaggccgaaatggtgctggtgcagagtaccggcatggcgcagtggctgcagatgaccctggccgtgcgcttcgggattgccgccaatatcgagttcccgctgccggcgagctttatctgggatatgttcgtgcgcgtcctgaaagatattcctggcgaaagcgccttcagcaagcagagcatgagctggaagctgatgaccctcctgccgcagcacctggaggaagacgattttatcctgctgcgccagtatctgagtgatgacggcgacaagcgcaagctgtttcagctggccgcccgggtggcggacctctatgaccagtacctcgtctatcgcccggagtggctgatgcgctgggaggccggccagcgggtggaaggtctcggcgatgcccagcagtggcaggcgccgctgtggcaggcgctggtgagctacaccgccgagctggggcagccgcagtggcaccgcgccaatctctaccagcgctttatcagtaccctggaaaaagcggacgaaccgcccgccgggctgccgtcgcgcgtcttcatctgcgggatttccgcgctgccgccggtctatcttcaggcgctgcaggcgctgggtaagcatgtcgatgtctatgtcttgtttaccaacccctgccgctactactggggagacattaaggatccggcgttcctggcgaagctgctgtcgcgccagcggcgccatcaccgcgaggcgcgcgcgctacccctgtttcgcgacaccgagcaggcgccggggttgtttaatgacgccggggaacaggatgtcggcaacccgttgctcgcctcctgggggaaactggggcgcgactatatctacctgctggcggggctggagcgctatgaggagctggacgcttttgtcgacatcgcccccgataacctgttgcataacctgcagtcggatatccttgaactacgcaacgcggcggtggccgggcagagcgcagaggcattcgcccacagtcgcgacaaacgtccgctgacgctggatgaccgcagtctgagcattcacgtctgccacagtccgcagcgcgaagtggaggttctgcacgataggctactggcgatgctggaggcggatccgacgctcacgccgcgggatatcatcgtcatggtggcggatatcgacagctacagcccctatatacaggcggtgtttggcgccgccagcggcgatcgctggctgccgtgggcgatctccgaccgtcgcgcccgagagtcgcacccggtgctgcaggcgtttattacgctgctctcactgccggacagccgcttcgccagtgaagatgtgctggcgctgctggacgtcccggtgctggcggcgcgctttaatatcacggaagaagggctgcgctacctgcgccagtgggtgaacgagtccggcgtccgctggggaatggatgacgacaacgtccgtgagctggacctgccggcgaccgggcagcatacctggcggttcggcctcacccgcatgctgttgggctacgcgatggacagccgcgagggagaatggcagtcggtgctgccgtatgacgaatccagcggtttgatcgccgagctggtgggcaacctcgcgtcgctgctgatgcagcttaatctgtggcgacgcggcctggcccagcagcggccgctggcggagtggctgccggtctgtcgcgatctgctgaatgactttttcctgccggacagtgagaccgaagcggcgctggcgctgattgagcagcagtggctggcggttattgatagcggtctggaggcgcagtatggcgagcaggtgccgctgacgctgctgcgcgatgagctggcccagcgcctcgatcagcagcggatcagccagcgctttcttgccggcccggtcaatatctgtaccctgatgccgatgcgttcgatcccctttaaggtggtgtgcctgctggggatgaatgacggggtttatccgcgcacgctaccgccgctgggctttgatttaatgagccagaagccgcagcgcggcgaccgcagccggcgcgatgatgaccgctatctgttcctcgaagcgctgatgtccgccgagcagacgctgtatatcagctatatcggccgttcgatccaggacaacagcgagcgttttccttcggtgctggtgcaggagctggtggattatatcggccagagtcactgtctcgccggtgacgaagagcttgactgcgacgccagcgaagcgcgggttaaagcccacatcacccatctgcatacgcgcatgccgttcgacgttgccaatttccaggaagacgagaacaagagctacgctcgtgaatggctggcggccgccggccagcagggagaggcgcatagcgattttatacagccgctcaccgcgccgccgattgacagcctgccgttcgatcagctcctgcgcttctggcagcacccggtacgcgcgttctttcagcagcgtttgcgggtcaatttccgcgccgaagaggacgatattccagacgacgagccgttcactcttgaagggctgagccgttatcaactgaatcagcaactgctcaatacgcttattgaggagcaggacgtctcggctatgttccgccgctttcgcgccgccggcgagctgccgtatggcgcctttggcgagctggtctgggagacgcagcgcctggagatgcaggcgctggccgagcgggtgatggccgagcgccagcaggcgcagagcatggagatcgatctgcagtgcggcggcgtgaacctgaccggctggctgcagcaggtgcagccggacggtctgctgcgctggcggccttcgctgctgagcgtctcccaggggatgcaactttggctggaacaccttgtctactgcgccagcggcggcaccggcgagagccggctgtttgtgcggaaagagggagagtggcgctttccggcgctggcgcccgccgaggcgcaggcgtaccttaacgagctggtggatggctatttgctggggatgtcgcagccgctgctgctgctgccggaaagcggtggcgcctggctgaaagcctgttacgacgccgaaaaggatgtcatcttaatggacgaagagacgcagcagaaagcgcggagcaaattcctgcagacctacgaagggaacatggtggtcagcggggagggcgccgatatctggtatcaacgcctgtggcgttcgctggagccggcgcattacgaagaaatcattgcccagacgcagcgttatctgttaccgctatatcgttaccatcggtccacacaaatttaaatagtataaaaattgcgcagtgaatgacggttcatttaatatgcgcaacgtatcacggactgatggacataaaaggctgcacgctgtgcagcgcaagtttgttaatgatgaggttcgtgaatgccccgcagtttatggttcaaggtttttgttgtgctggccgccctctgggcgccgtttagtcaggccgacaccggatggcagccgattcaggagacgatccgcaaaagcgaaaaagatacgcgtcagtatcaggcgatccgccttgataacgacatggtcgtgctgctggtttccgatccgcaggcggtgaaatcgctgtcggcgctggtggtgccggtgggatccctgcaggatccggcagatcatcaggggctggcgcattttctggaacatatgacgctgatggggtcgcaaaaatatccccagcctgacagccttgcagagtttcttaagctgcacggcggcagccataacgccagtaccgcgccctaccgcaccgcgttttatcttgaagtggaaaatgatgcgctggacggggccgtagatcgcctggccgacgccatcgccgcgccgctgctggataaaaaatatgccgaccgcgaacgtaacgcggtcaacgccgagctgacgatggcccggacgcgagacgggatgcgcatggcccaggtcagcgcggagaccatcaacccggctcacccggcggcccacttctccggcggcaacctcgagacgctcagcgataagcccggcagcccggtgcttgatgcgctgcacaccttccgcgatagctggtactccgccaatctgatgaaagcggtgatctacagcaacaagccgttgccggcgctggcgcgcatggctgcggacacctttggccgcgtgccgaatcgtcagatcagcaggccggatattaccgtcccggtggtcacggatgcgcaaaaaggcatcattattcactatgtgccggcgatgccgcgtaaagtgctgcgcgtcgagtttcgcatcgacaacaacagcgatcgcttccgcagcaaaaccgatgagctggtcacctatcttatcggcaaccgcagcccgggcacgctctctgactggttgcaaaaacagggtctggcggaaggtatccgcgccgattccgatccggtggtaaacggcaacagcggcgtactggcgatctcagccaccctcaccgacaaaggcctggcgcaccgcgatgaagtgacggcggccattttcagctacctcgacctcctgcgtactcagggcatcgacaaacgctatttcgacgaactggcgcatgtgctggcgctcgatttccgctatccgtcgatcaaccgcgacatggactacgtggaatggctggcggacaccatgatccgggtgccggtcgagcatgcgctggacgtggtgaatattgccgaccagtacgacccgcaggcgatcaaagaccggctggcgatgatgaccccgcagaacgcccgcatctggtatatcagcccccaggagccgcataacaagacggcttactttgtcgatgcgccgtatcaggtggataagattagcgagcagacgttcgctgactggcagcacaaatcgcaggccatccagctgcagctgccggcgctcaacccctatattccggatgacttcacccttatcaaaagcgataaagcctggccgcatccgcagctgatccttgatgaaccgacgctgcgggtggtgtatgccccgagccagtattttgccagcgagccgaaggcggacatctccctggtgctgcgtaatccccaggcgatggacagcgctcgccggcaggtgatgtttgccctcaacgattatctcgccggcatcgccctcgaccagctcagtaaccaggcggcggtcggcggcatttcgttctctaccggcgctaataacggattaatggtcaatgccaacggctatacccagcatcttccggcgctgttcagcgatctgctgcagggatacttcagctatacgccgaccgaggagcagctggagcaggccaaatcctggtatgcgcagatgatggattccgccgagaaaggcaaagcctacgatcaggcgataatgccgatccagatggtctcgcaggtgccgtacttccagcgcgaagtgcgccgggcgctgctgccctccattacccttaaagaggtgctcgactaccgcgccaacctgaaaaccagggggcgtcctgaactgatggtgatcggcaatatgaccgccgatgccgccacgaccctggcccgccagatccagcagcagctgggcgccgacggcaacgaatggtgccgcaataaagacgtggtggtgaaccgacagcagctggcgatcttcaacaaagcgggcaatagcaccgactccgcgctggccgcggtgtttgcgccgcccaacgtggatgagttcagcagcaccgccgccagcaccctgctggggcagatcattcagccgtggttctacaaccagctgcgtactgaagagcagctcggctacgcggtctttgccttcccgatgaacgtggggcgccagtggggcatgggcttcctgctgcagagtagcgataagcagccggccttcctctggcagcggttccaggccttcttccccaccgcggaggcgaagctgcgggcgatgaagccggaagagtttgctcagctccagcaggcggtgataagccagatgctgcaggcgccgcagacgctgggcgatgaagcctcgaaactgagcaaagatttcgatcgcggtaatatgcgttttgattcacgtgataaagtagtggctcagattaaactgctgacgccgcaaaaacttgccgacttcttccatcagacggtggtggatccgcagggcatgacgatcttgtcccagatttccggtagccagaatggcaaagcggactatgcccagccgaaaggcggcaaagtgtgggaaaacgtcagcgcattgcagcaatccttacccctgatgcgagagaatgaatgaccgacaccgctgagtctttggatcccctgcgcttgcccctgatcggcgagcgcctgatagaagcctctgcgggcaccggaaaaacctttaccatcgccgcgctgtatctgcggctgctgttggggctgggcggtgaggccgcctatccccgcgccatcagcgttgaagaactgctggtggtgacctttaccgaggcggcgaccgaagagctgcgcggccgtatccgcagcaacatccacgaactgcgcatcgcctgcctgcgcggcgaatccgacaatccgctctacagcgcgttgttggcggagatcgccgataaagacgacgccgcgaagacgctgctgctggctgaacggcagatggacgaggcggcggtattcaccatccacggcttttgccaacggatgctgagccttaacgccttcgagtcgggcatgctgttcgagcaacagctgatcgaggatgaatcccgcctgcgctatcaggcctgcgccgatttctggcgccgccactgctatcccctgacccgcgatatcgctgcggtgatccacgacgtctggaaagggccgcgcgatctgctgaagtcccttgaccgctggctgcagggcgaagcgccgcagcttaagtcgccgccagcccctaacgagacgctggccgaacgccatcagcagatcatcgcccgcattgactcgctcaagcagcagtggcgcgagcaggtgggcgagatcgaaggcgtgctggaaaattccggccttgaccggcggaagtttaatcgcggcaaccagggcaagtggatggagaaagtgaacgcctgggcgcaggaagagacgttaagctaccagctgcctgacgcgctggagaaatttgcccagtcgtttctgctcgagcgcaccaaagccggtggcgaaccgccggtgcatcccctgtttagcgccgtagagtcgttgctggcctcctcgctgacgctcaccgatctggtgctggcgagagcgatggtcgagatccgcgatgcggtcgcccgcgaaaagcgccgccgcggcgagctggggtttgacgatatgctcagccggcttgacgaggcgctgcgcggcgacagcggcgagacgctggccagcgccattcgccagcgttttccggtggcgatgatcgatgaatttcaggacaccgaccctcagcagtaccggatttttcgccgcatctggcgccggcagccggagacggctctgctgctgatcggcgatccgaagcaggccatctacgcctttcgcggcgccgatatctttacctatatgaaagcgcgcggcgacgttgccgcgcactacaccctcgataccaactggcgctcctcgccgggcatggtgggcagcgtcaatcggctgttcagcctcagcgataaccccttcatgttccacgagatcccgttcctgccggtgaaggcggcggcgaagaacaaggggctgcgctttaccgttgacgcggcggacgtaccggcgatgaacgtctggctgatgcccggcgccactgtcgggtctggcgattatcagacctttatggcgcagctctgcgccacgcagatccgcgactggctgagcgccggtcagcaggggcgcgcgctgctgtggcgcggggaaacctcgcgcccggtacaggcttcggatattaccgtgctggtgcgcaaccggctggaggcggcgcaggtgcgtgaagcgctgcagacgctgggcattccctcagtctacctctctaaccgcgacagcgtttttgagacgcttgaggcccaggagctgctctggctgctgcaggcggtgctggccccggagcgggaaaataccctgcgcagcgcgctggcgacgtcgatgtttggcctgaccgcgctggatattgaaaacctgaaccaggacgagcaggcgtgggacgcgctggtggaagagttcagcgaataccgccagatttggcggcagcgcggggtgatgccgatgctgcgggcgttgatgacagcccagcatatcgccgagaacctgctggcgacccgcggcggcgagcggcgtttaaccgacattctgcacatcagcgaactgctgcaggaggcggccagccagctggaaagcgagcatgccctggtgcgctggctggcgcagcatatcgccgagccggacagcaacgccgccagccagcagatgcgtctcgaaagcgataagcacctggtgcaaattgtcaccattcacaagtcaaaagggctggaataccccctggtctggctgccgtttatcgcccggtttcgtaaacaggaccaggcgttttaccacgatcgcgagacgttcgcggcggtgctggatctgggccaggatgaggccagcctcgagctggcggaggcggaacgactggcggaagatctgcgcctgctgtacgtcgccctgacccgcgcggtctggcactgcagcctcggcgtggcgccgctcagcagccggaaatccggcaacagcgatttccacctcagcgcgctgggacggctgctgcaggcgggcgaagccatggacgccgccgggctggctgcgcggctggcggacttctgtcatggcgatattgcattacagattccgggcgaactggatctcaccccgtggcaggcgcccgcggcgaccatcccgcgattgtcggcgcgcgagctgcagcgccgcatcgccgacgactggcgggtgaccagttactccggactgcagcagcatggtttcagcggcgggcaggatttgctgccgcgtctggatgttgatgccgccggcgtcggcgaagtcgtggaagagccgcagctgactccgcaccagttcccgcgcggcgccgcgccggggaccttcctgcacagcctgtttgaggagctggacttcacccagccggtgccggaagggtggatggcggagaagctgcagctgagcgggtttgacgcgcagtgggcgccggtgctgaccgactggctggggggcgtgctgaagacccgcctgccggggccggatatcgcgctcaatcagcttgcggcgcgggataaacaggtggagatggcattttacctgcccatcgcccagctgctgacggcggagcgccttgacgcgcttatccgccagtacgatcccctctctgccgacacgccgccgctggatttccgccaggtgcgcggcatgctgaagggctttatcgatctggtcttccgtcacgaaggccgttattacctgctggattacaaatccaactggctgggggaagatcgcgaggcctacacccggccggcgatggagcaggcgatgcgtgcccaccgctacgatctacagtatcagctgtatagcctggcgctgcaccgctatctgcgccaccggctggccgattatgactatgaccgccacttcggcggcgtgatttatcttttcctgcgcggcatggacgggcaggagggggggcaggggatcttcaccacccggccggtgcgaccgctgattgacggtctggatcagctttttgccggagaaactcaggaggaggcctcatgactttcgaacaactactgctggcggcggtggagcagcgtctgctgcggccgctggacgtccagtttgccctgatggtggcgcaaaacgacccgccggcggtcaagctggcggcggccttgctgagccgggatgccggcgaggggcacgtctgtctgccgctctcgcggttgagcggcgacgaggcgctgagcggtaaagcgggggagatccgcgatcggctgctggccgaagccggcgcgccggaggactggcccgggctactgctcgcttcgtcggcggtgagctgcggcgatgctccggcgccgatgattttgtgcggcgaccggctctatctgaatcggatgtggcgcaacgagctgaccgtcgcccgcttcttcaatgaagccaaccgggtgctggagatggatgaggcccggctggcgtcaaccctgaatgccctgttccctgccaccggcgaaaccgactggcaaaaagtggccgcggcggtggcgctgacccgccgcatctcagtgatctccggcggtcccgggaccgggaagaccaccaccgtggcgaagcttctggcggcgctgatccagatcgaagacagcccgcgctgtcgtattcgcctggcggcgccaaccgggaaagcggcggcgcgtctgaccgaatcgctgggcgcggcgctgagaaaattgccgctgaccgacgcgcagaaagcgttgattcccaccgaggccagcacgctgcatcgtctgctgggcgcccagccaggcagccagcggatgcgctatcacgccggcaacccgctgcatctggacgtgctggtggtggatgaagcctcgatgatcgacctgccgatgatgtcgcggcttatcgacgcgctgccggcccacgggcgggtgattttcctcggcgatcgcgaccagctggcctccgtagaagcgggggcggtgctgggggatatctgcgcctgggcgagttcgggctataccgccgcgcgggcgcaggagctgacccggctgaccggttcgccggtgccggcgggcgagggggctatcgcgggcgcgctgagagacagtttgtgcctgctgcaaaagagctatcgcttcggcagtcactccggcatcgggagcctggcgcgggcggtgaacgctggcgcgcgcgcggaggtgaaggccacgctgcgccagccgtttgacgatatcgcgcttcatcccctcagcacgaccgaagagtacgaagccatgctcggcgcggctcagcagggctatgagcgctacctgcagctgcgccgcgagcgggccgaaccgcaggccatgctggccgctttcagcgaattccagctgctgtgcgcgctgcgcgaggggccgtacggcgtgagcggcgtcaatgagcggctggagcagcggctcaaccgccagcgggcgatcgccctgccgcgccactctcgctggtatgatggccgaccgatcatgatatcgcgcaacgacagcgcgctggggctgtttaacggcgatatcggcatcgccctggagcgcaacggcgagctgcgggtgtggttcctgatgcccgacggcgccatcaagtcggtgcagccgagccgtctgccggagcatgataccgcctgggcgatgaccgtgcataaatcgcagggctcggagttcgaacacgcggcgctgatcctgccggcgcgcagcgtcccgctggtgacccgcgaactggtctacacggcgatcacccgcgcgaaacggcggttgtcgctctatgccgacgagcaggtgctctcccaggccattgtgacgcgcaccgaacggcgcagcggcctggcggagattttcgccgggcgcgaagccccctgagacgccgggtccgggcgatggaaaatgctgcagccgttgcccgggctggcggaaaaatcagtaactgaagaacagagggataagccagagcgccgagatcgagttcatggcgaaaaagcggactgctgcgccgccggccagcggtggggtggaacagcgggcacaaaaaatcaccagcgaggagatgagaagattcatgccggacgtcagggccagcagaaataatatcgcgatggcggcgccgagcgcggcatagccatgctgatgatggcgctggttatcccagaggagcagtatcatcagcaaccacggatagagggcgaccgcggtggtaatgagattaatatgtctgaccagccagttcggtttggtttccattctttaagcgatccttgctgggcgggtggcggccgcggcgccagtcgacgtcctgtcgacagccaatagcatatcggtgagccagcgagaaagaaatggcctgcgcggaaaccaggaatttcgcccgcgtgcgtacgccaggctggcgggaagaggggcgggagaccggccggggataaagcgataagcgtcgcgctatcccgggccgttagatagagaggagaagggcttaagcgaggtcggccatcagcaccttcgaccggcgctgatagttatacatctgctttttactctccggcagcaggtcgatatccaccggcgtgaagccgcgctcctggaaccagtggatgctgcgggtggttaacacgaacagcttgctcagtcccatctgcctggcctgagcggcaatacgctccagcagcacctctccccgcgacgagctccggtaatccggatgcaccgccacgcaggccatttcgccgatcttctcttccgggaaaggatagagggcggcgcaggcgatggtggtgttatcgcgctgaataatggtgaatttgtcgatctccatctccagctgttcgcgggaacggcgtaccagaatgccctgctgctcgagcgggcttatcagctcaagaataccgccgatatcattgatggtcgcccgacggatctgctccgcgctctccatgacgatctgggtgccgatgccgtcgcgtgaaaacagctcctgcagcagcgcgccattttcctgatagctgatcaggtggcagcgccgtacgccgctgcggcaggccttcaccgccccgcgcaggaagcgcacggtgccggagttatagtcttcgtctgcttccagctcttcgacgcgggcttgcgcctcattagggaacagttcggagacaatttccccggcctggttgtaaaccccttgcgacgaacagaagccgatcattttctccgccttcagcttgatggccagctgggtagctatctcttccgaagtcaggttaaagctctcgccggtgaccgacaccgcgaccggccccatcaggacaatggcgccgctgtcgagctgacgatgaatcgcctcttcgtcaatgcggcgaatgcgtccgctgtggcaataatcgacgccgtcatcgacgcccagcggctgggcaatgataaagttgccgctgacaacgttgatatgggccccctgcagcggggtgttgttgaggctcatcgacagacgggcggtgatctccagctgcagcatccccgccgcctgcttaaccagctccagcgttttggcgtcagtcactcgcgtctgcttgtgatagaccggctcgtgatggtgctcggcgaggttagcgtcaatctgcgggcgggcgccatagaccaccaccaggcgaatgcccaggctatgcaataatcctatgtcattgacaatatttgagaaattttcatgctcaatggcttcgccgcccagcatgatgacaaacgtttttccccgatgggcattaatatagggaacagaatggcggaatccttctaccagttcagtgcgacgttccttcaccatgacaaaccctcaatgcatgattattcgtaattattgtatttttattctgttttgccgttaaacgcaagccccaatttgaggctaagccgcgaaaaacatgtgacccggcgcagggtgtcaatgaatgtttacccttttatagatgacaggttatatgcctttcgttaaagtttctggtcaatctgtttgttttgggtataaatgcgtttttattgcttgggagtggcatgtcgggaaacaactctggattaagccgtcgccgtttattgcagggggcgggcgccatgtggttaatgagcgtgagccctgtcgggctggccgccgccgcgcgggtggtcgctgttcgcgtctggccagcatcgacctacacccgcgtcacggtggaatcgaatcatgtgctgaaataccggcagtttgccctcagtaatccggaacgggtagtggtcgatctggagggggttaacctgaactcggtactgaagggcatgggggggcagatccgcgctgacgatccctttattaagtccgcccgggtgggccagtttgatccgcaaaccgtgcgcatggtcttcgaactcaagcagaacgttaagccgcagctgtttgccctcgcgccggtggccggctttaaagagcgtctggtgatggatctctaccccgccaacgctaccgatgttcaggatccgctgctggcgctgctcgaggattacaacaaaggcgatctggagcggcaggtgccgccggcgcaaagcgggccgcagccgggcaaagccgggcgcgaccggccgattgtcatcatgctcgatcccggacacggcggcgaagactccggcgccgtgggaaagtatcgcacccgcgaaaaagacgtggtgctgcagattgcccgtcgcctgcgggcgctgatcgacaaagaaggcaatatgaaggcctatatgacccgcaacgaagacgtgttcatcccgttgaaagtgcgtgtcgccaaggcgcagaagcagcgcgccgacctgttcgtgtcgattcacgccgatgcctttaccagccgccagcccagcggctcttcggtgtttgccctctccaccaagggggccaccagtaccgcggcaaaatatctcgcccagacgcagaacgcctcggatctgatcggtggggtcagcaagagcggcgaccgctatgtcgaccacaccatgttcgatatggtgcagtctctcaccatcgctgacagcctcaaatttggcaaggcggtgctggagaaaatgggcaatatcaataacctgcacaagaaccgggtagaacaggcgggctttgcggtgctgaaggcgcctgacatcccctccattctggtggagacggcgtttatcagtaacgtggaagaagagcgaaagctgaaaacggccaaattccagcaggaggtggccgagtcgatcctcgccgggattaaagcctactttgccgatggcgcgacgctggcccgccgcggataaccacacaggaaagggacatggccttactgaaaagcgcccatggcggtaacacccgcgaggccgccgccctgctgggcattgcgcccggcgagctgctggattttagcgccaacattaatccgctggggatgcccgcctcgctcaggcaggcgatcgttgacaacccaggctgcgccgaacgctaccctgacgtcgagtatcaacagctgcatcaggcgctggctgcccaccatcagttgccggcggcgcatatcctcgccggcaacggcgaaactgaatcgatcttcaccctcgtccacggccttaagccgcggcgggcgatgatcgtcattcccggtttcgcggagtaccggcgggcgctgcagacggtggactgcgaggtggtggagtatgccctgcgggagcgcgatggctggcagctgaccgacgcgatcctcgatgccctgactccggcgctggactgcctgtttctctgcaccccgaacaaccccaccggcctgctgccggagcggggcctgctggaagccattgcgcagcgctgccgggcgctgaacatcagcctgatcctcgatgaggccttcctcgactttatccccgaccagccggggtttattcctctgctggcgcagcatccgcacgtctgggttctgcgatcgctgaccaaattttatgccattccggggctgcgtctcggctacctgctgaacgctgatgcccaggcggtggcccgactgcgcgcgcgacaaatgccgtggtccatcaacgcctatgccgccctggccggggaaattattctccaggatcgggcgtatcagcgggccacctggcagtggctgcaggaggagggagcgcgtttctatgcgcagctgcaggagatggccgggctgaccgtgtggcccgggcgtgctaactacctgttcttgcgctgcgacagagccgattttgacctgcaatatgccctgctgcgccagcatgtgctgatccgcagctgcgccaactacccggggctggatagccgctatttccgcgtggcgatccgcagcgccgaggaaaacgaccagctgctggcggcgttgcgccgggtgctggcctgaggcctactgcaggatgacgcccccgggcaccatcgccagcagatgctgctgcggccagtgggcggcgatgtcgctgtctgccagccgccattgcagaaattcgacgtcatgccgacggcggtccagcagcaggccgacgacgctgccgctgtgcgccacgttgagaccatagagccctgcgctttccaccaggtccagcagcgcgtcaaaccccggcttaggcaacagctgctggctggcaatggcgctgatggttgctgcttcgcccagcagctgcgggctgccgcagtggcaggcctgttgaactttctcccacgccagctgcagccgggaggcgtttgccaacaggcccggctcgcgcggcagctggtgatagtcggtggtgcgcagtgtcagcgggctctccagcactaacaggtcgagcgccggcggagggggacaggcgatttgcgtggcggcggtattatggtcgaacagcgtcagctggcgaaacagggtgctgtcggtaggctccagcgcgacgcacaggcgcgccagcgtcggctcatccagtagatggcccagatgatgggcggtggcgacggcggtggcagcgatatcggcggtgctgctggccatccctttggccactgggatcgttgagtgcagggtgatgcggatctgctggctcagcgctggggggtagccccagtgggccagcagctggtcgaccatcgcccgcgacagcggccgctcgtcttttcgcggtactccggtctcgacctcgacggtgctgtaccagtccaccggacaggagaccagcttttcgctgccgaggatccagccctggataagttctccgcacgaggcgggacattgtgcaacagccacgttttcacctttccgcttaccttcgccagggcgcatagtggcatggcgacccgccggttaccatgattctccgcaagaggaggcgcgtcgtttatgccgacaccgccagctcgcgcgcctgcggcaatgcaagacgcatgacgtcgcgggcaatcataagctcttcattggtgttgatcaccgccactttgaccagcgcattatccgcctgaataaaggtcgcgctccgctggtttttctcgtcgtccagcgcgaggccgagaaaatgcaaattgcggcagatcgccgcccgcgcccgggcggaattctcgcctatgccgccggtaaagatcagcgcgtccagacctcccatctgcatgatatagctgccgatagtcgcgcgaatgcgttcggcaaacagcgacagcgccagagccgcccgttcgttgccggcgtcggctgcctgttcgacgtcgcggtaatcagaggacacgccggagacgcccagcagcccggattcattattcagcagctggctgagctgctgggcggatttcccttctttctccaccagccagggaagaatcgacgggtcgatatcgccgctgcgggtgcccatcatcaccccggactggggagtaaagcccattgaggtattcaccgattgcccgcctttgatggcgcagacgctacagccattgcccagatggcagcttactacccgcagggcgctcagcggtacgcccagcttttccgccagcgcgctgctgacatagtgatggctggtaccgtgaaaaccgtagcggcgaatgcccagctcggcgtaataacgccaggggaggggatagagccaggcctccggcgccagggtctggtgaaaggcggtatcaaaaaccgccaccgccggtaccgcgggtaacagctggcgaaagagacgtatgcccagcgcattgaccgggttatgcaacggcgccagctccgccaggcgctcgatctcccgcagggtatcgtcgcagaccagcgcggcgtctttgaagcgttcgccgccgtgggcgacgcggtggccaacgccgtcgatctcctgcaggctgctgaggatcccgcggccggtcagcgcctccagcagcagggtcactgcctcatggtgatcggcgatgggcagcgtctcctgccatttctgtgccgacgttttcagcgtgaagcgggcctcgggcaggccgatacgttcgatcaacccctgacagagcaacgccccctgcggcatgttaagcagctgaaacttcagggaggagctgccggcgttaatcgccatgattttataggtcattgatattcctctgcattcaggcaggcgaacaggtcatcaagcccgtcgccggttaacgcgctggtgataaaaatatgtccggcgcccgccgcctcgagccatgtccggacctgttgcagacggggcggggcggctaaatcggctttggtgatcaccccgataaccgggcggttcatcggggcggtaaaccccggagaaaagggtgaccagggcgcatcggcattcagtaccagcgcgatgacatcggcctcgcaggcgctggttaacagcgcgctgtacaggcagcgattttccagatattccccgggggtatcgatggtggccggcgtccagacgatggcctgggttttctgatagcgcagggtttcgccgcgcaatacctgggtcagcgaagttttgccgcactggctgggtccgataagcatcaggcgtttcatgggctcaggtccgggtaattgggcaggcggtgaagcgcatcagctcaccgagggtgcgggtgacctgcctgagcgcgtactccacggcggagacatcgccggtcaacaccaccgcgccggtgaagcgatcgagaaaaccgatctccaccgcgccggacttggtagcgatgtcgcaggcgataatcgatgcttcactgggggtaatggtaagaatgccgatggcggagaccgcgtccggcagacccagctttttgaacagatctttgccaggattggcaatgagatgcgccagagtaacctgtttgcccgggacatactcctggatcatgcgttcggtaggggtttgcggttccattatccctccatcagctgttgccacagcgcatcgtgcggtcgcgggatcactgcccggtgaaccagtaatcctttctcgcctgcgctgtcgctggccaccgtgacggcgttgtcgacatcggcgatatcacccgccaccaccatgtagcatttgccgccgataccaaacgccatatggacccgcaccagggtgacgttggccgctttcaccgcgcggtcggcggcgctgatgcacgccgccacgctccaggtttcgacgatccccgccgcctgccgctgcccgaccacgttgagaccgctgatcgccggtagtacgctggggtgaatgttggccagcaccaggctgtccaccagcatctccccggcgcgcgcggtgccggcggcgattgcctgctgcacggcgccgacgtcgccgccgagcatcagcaggaatttcccggggcaaagggttctgcagagcaggagctgtacgttcgcgcttttcagcatgacgtcgcccagctccatccccctggcgatgctggtcagttctaaaattccgatagcctgggtcatgattaacctcttacaagcgtaatggcctgctccgtgatggcggagaccaggccgtcaatactggcgtgcaccggcgcgccgagggcgtcggtggggatatccgccagcacctggccgcgcgttacccgctctcccggcgcgacgcagggcacggcgctgatgccgatatgctggcgcaggggcagggtgacgcaggccacctccggttccaccgccctcagcggcgcttcctgataccagggatcaagtcccagtttgctgatgagccgcttgaccggcaccaggcggtgcttcgccatctcgtccgccggacgcagcggtccgtcgtagcgcaggtttttcgccctcagctcacgtttcagcagacggttgatgcgcatgggggaaatacccaccgggcaggcgacgctctcgcaaacgttgcactccgaacaggtcagggcgctgagcagcagcgacggggtggccgcctggcgatagttcactgcccgcaccagcagatgaggggaaagctcatggccgatcaggtgccgggggcataaatctgtgcataaacggcactgttcacagacggtgcgggcgatggcgagcagcgttcgttcatcctgccgccgtcgctggatcaatggatggttgcccgggagcaccagcaggccgccggtggttttggtgaccggtgtctcgagggaggtaataagcgagcccatcatcggaccgccgttgataaaccccggatcgtcaaccgtcgcgccgccggccagatccagcacctcgcgcagcgatatacccagtggtacggccagcgtcagcggacgggcgacggcgccattgacggtcaacgtccggcgagttaccggatagccctgttccacggctctggcgatattgagcaccgtctgcacgttattgaccaccacgccgacgctgaccggcagcgcggcaggtggtacgcggcgtcccgtcgccagccagatagtgagcacctcatccccggccggatagacgtcaggcagaatatgcagccgggcccattccgggagtcgtggggttaatgccgcaatcgccggagcatatttcgccttcagggcaatgatcccttcccgggcgccagtggcggtcatcgcgtaacccaggccgcgaatcagtcggtcagcctgctgagccatcagctgttggtcaaccttcagcatcggttcgcattcggcggcgttcaccagcacggtgtccacccgggcctgcagtttgatgtgggtcggaaagcctgcgccaccggctcctacgacgccagcggcccgaacgcgttcgcggatctccgctgcatcaatgcttgatagtggcactatcgcttcactcattgcaggttctccagcagttgcgcgatggccgcgccatcgaccggacgcgggttggtgcgcagggtggcgtcggccagcgtggccggcaccatggcgggaattcgcgataagaaaaggggatacttttcctgcagcgcgcccttgagggtgggaatggcgcactgctgtttcagcgtttccaccgcggtaagcagcgcctggaaagcctcctgttcgccagcttcgggcgggcagaagcggcaggccctggccaggcgcgcatagcgcttagccgctcgcggctcgccggcattgaagcggatcaccgcggtcagcagcagcgcattggccaggccatgggggaggtgaaactggccgccaagctgatgggcgatcgcatgattgagcccaaggccagcctggctaaaggccataccggcgagggttgatgcattgtgcattttgctgcgggtcgcaatgcagtcgccctgacgaatcgcaacgggcagggcgcgaaacaccagccttacggccttttccgccagcgcatcggtaaaatcggtggcctgcggcgagacccatgcctccagggcgtgggtcagcgcgtccagcccggtatgggctgtgatggtgggcggtacgctaaccaccagcgtcgggtcgatgatcgccatgtcgggacagagcgcctcatggaacagcgggtatttgatccctttttccgggtcgctgatgacgcaggcgctggtcacttccgaaccggtaccgctggtggtggggatcgccacgcaggtgtcgacaggcagaccgccctgctggctgaaccagacgatagccttggcggcatccatcgccgagccgccgccgaagccgatcaccacctgcggacgcagggcctgcatctgcgctatccctttcgccacggtgtgaatggtcggatccggcgtaatatcgctgaacacgctgacgcggttgctggcgggcagcgcggcgcgcagtcggtcaagcagcggcgagcgcgccaggaagccgtcgcagacgatccagatgtgctgatggctaaagcgctgcagcgcggccaggctgcccgggccgctgtagaggcgcgtttgcagagaaaaggtatgcatggcgcccccggttagcgaatggaaaaaccgttggtcaacacgcagcgccgcaggcgggcgaacgtccgcgcggaggtggtgccttctccggttggcgtggcgatggtgaaggtggtaaacccttcgccgccgacgccgattcccgcgtaagacgggccatttttgacaaaaatggaggtctgcagcgtgcgtgccgccagattgagccgcgagacattctgcgagtgcataatggcggtgtggtgcagaccctcctcaacgcgcagggccagcgccagggcgctgtcaaagtcggcgaccctgacgatcggcagcaccggcatcagctgctcgcaggtcacccaggggtcgttcgcctccacctcggctatcagcaggcgaggagggcgaggcggaacggcgagacccgccgccgccagcagcgcagccgggcttttaccgaccagttttttattcgccgcgccgtcgggcaggcagacggcacgcagggtatcggcctcctgtcggctcaacagcagcgcgtcaaaatcctgcatctgctggatcaggcggtcagcgacggaggcgacgacgatcaggcttttttcggcgatacagggcaggttgtaatcgaaggcggcgccgctgatgatatcttcggcggctttgacgagatcggcggtttcatcaacgatgcacggcggattgccggcgccagcgccgatcacttttttaccgcttttcatgcccatcgccacaatgccagggccaccggtgatagccagaacggcaatcagcgggtgggacatcatttgctgggtggcttcaaaggtcggctcggcaacggtcaccaccaggttacggatcccgctgcagcggtaggcgatctcttcgatcctggcgataagcttcaacgagacctttttcgcgccgggatgggggctgaaatagacgctgttacccgccgccagcatgctgatactgttgttgataatggtttccgttgggttggtgctgggcgccacggcgccaataaccccgaacggcgagtactcaaacagcaccatcccgccatcgccggtgagggcgctggtagtgagatcctctatgcccggcgtgttttcaagagcggctttatttttcagatatttatcttctttgttgcctatgccggtttccgtggcgctctcttccgccaacgtcgccagctcgggggccagcgtctcccgcagggcgctgataatggcgctgcgggtttttagcggacactgctgatagcggagaaaagcctgatgagcggcgtcgatggcgctgccgacatcgcagaaaatgccctgctcttgctgaggggcagggggcgtcggcgcgagcttttcactgaggatggtgcggataagggtttccagttctgctgtattcattgatgagttctcacgttaatggccgccatggcagcctgtgcaatagccatatcctgctcgacgctgccgccgctaatgccgatgccggctattagctggccatcgcgccacagcggatatccgccgccaaaggtgacgactttgccctgcagatggctctccagaccgtacagcgcagcgcctggctgtacggtcgtcgcgagctcgtgggtggcggttttcatggcgacggcggtccaggcttttttcggcgccagctcgctgctgaccagcagcgcatcgggcattcgccaggtcacggtttcggtgccgtgtgcgtcaacgatgctgaccaccaccggcacctgcagctggcgggcgtgttcaatggcctgacggatgagctgatgcagctcgtaaaaggagagcgacccggcctgggctttgggcgcgtcgggcgcaggcgacccgctggcggccagatagcgggccgcgatctccgtcacaaggcggcgctggtgagcggcatgatcctcgctgcgcgccagggcatacaggcagtcagataagcggttcagataacgcagcagtatctgacggatagtaacctctgccgccagctcgaccagccggcgctccgcccgtctggcaacggtgcgggccaggtgcagacggctggcggcttcacagcgtccgggcaatacaaactggtgcagcgccggcacgcgggccatctcgcgatcgatggtctgctccagcagggcaatctcttcgctgctgatatagcgcttacccggtgatggctgttcgctgtcgctggcgagctccgcgctgaaccaaaaaatgtgctgctgcagggcttcgagcagggtgcgctgttcctcttcagcgacggcgcagacgcacaggctcagcatggcgttcagttcatccagggtgccgtaggcttcgacgcgcggatgcgtcttgctgacccgctggccggtaaagagtgatgtactgccggcatcgccggttcgggtatagatagccacaggcgcccccttagcgtgaaagtgagtcaacaatgcccacgacggcaagatcgatggcctcattcgggccgctgaaaacgtggcgtgcgctcgagccgctgcagagcagcaccagctcgccgacgccagcgccaaccgaatctaccgccacttcatcgccgctcgtggggagaatcggacgatcgtcgtccgcgcttacccggcgcaccagcagcagttttttgccgttcagagagggcgatttttgcgtcgagacgacggcgccggtcacgcgtgccagatgcatagttcactcctgcttaatcaattgaacatgccgcgcgacggccgcttcgcgggcgagggcggtgataatgggacggcggcgcagcaccagatagccgccactgaaacgggctacgtcggcataggtgagcaccgacgcggcgtgaagcctgacgggctggccaagcggatcgctgaacgtcagcggcaagcgggcgagtttttttaccgccagcgcggggagcagggcgggaagcagcgttagctgtacccgaacgccccaggccatcgcctcatgcagtgcgcaaccggctgccgccagcgcacgctggccggcaagctgctccagcagcggtaaatccacctgcacgatgcgcagcgaagcgtgctggcacagcaggctgcggatatccgcttcgccgagctgggccacgctgagcgtggccgtgctgagggcgcgatggcgcagacgggcggcgacctcttcgacgatacgctgcagcatcgcgtggttcatggcttcgtcaccagcgttgcccaggcttgcgcagcgtcagcgcctgccgcattggcctcgtcagtatcgatgtgcatctcaagacgcatatccggggcaacgcggaccgccacgttgtcgaagataagccgcctgtcgctgccttcgatcgccaccgcgacgctatcgccatgggagacgcgcaggatcaacgcatcaagtggcgacatatgaatatgtcgctgggcaacaatcgtcccgccgctcaactccagttcggcaaaggggcttatcaggcggatccccggcgtgccctgcagattgccggacatgcgcagcggcgcggcgataccgaggatccgggcgtcggtgcgtgagatttccacctggctggtctggcgcaaagggccgagcaggcgcacgttgtttaatcgccctttggggccaaccagggtcaccgtctgctctgcagcatattgtcccggctgcagcagcgcttttttcggctggatgggctgcgcgggaaaaagcctggcatagtcagccgccgctaaatggatatggcgactggagataccgattggaatgggacgctggcgcatctcatccagcactttgttgactgtcgaagccaactgttgtttatccattacgcgtcacctcgtttaccggcgtgcaggcactgcgagcggggatcgcctttttgtcgtgggcagtgtgggtccaggcccaggttgcaggtcacccgctccgtagagtgggagggggcgtctgtgagggccgtgttctcctccgtcacggcgacgtcaggcgctggtgaaggcgcctggacgcgggccggcagcaggccttccccgggcctggcgataaccttctgcgctaccagcccctgctgccgttcggcgagttcggccccggtcatcaccgccgcctggacagaggccacatcaccggcgatcttcaccaccatccagccggaaccgttggtcttttccagggcgagcagcgtgatggcggccgctttcgccatagcgtcggcgcaggtgatggccagggccagaccgctgacctcaagtaatcccagtgattgcttcacgctgtgctccttttttgagggtcagacggatttcggcagaatggcctcaacatcgctatgcgggcgcgggatcacatggctggacttgacctcgccgaccacgctggccgccgcgctgccggcgtcaacggcggctttgaccgcgccgacgtctccgcggaccatcacggtaatcagcccggagccaattttttcgtaaccaatcaactgcacgttggcggatttcaccattgcatcagcggcttcaatggcgccaaccaggcctttcgtttcaaccagtcctagtgcgttattcatactgcgttctcctgtggattaagcatggcgatcccgaaatgggatccctttgacgagacgagccgcattgttgccagtgtttcgccgggccagcctgttctggtgatacatcagcgaaaacaacggagttgatgcgggtaaatttttgtagtgcacgatgagccgttcccggtcgcaggcgatgcctacctgcagcggcgaacgctgcgccgcctgccaggcgtgatggataagatcgccgccggtctgcggctgcagaacaaaaggaatgccttcctcttcaatgcccagcaggacatcgcgccactgttcgctgcattcgtcagtgacggcaatgacgatggcgggggcgactacgctactctccatgtgtgcctcctttttgccaggaaaggagtaatccgctggcgaccgcattgcgtgggccttcacagccgcggatgttgccgcgcccggcaaccagccggtagtgcgccagcgcgtcggtgaccagctgggggatctcgaaatcgagggacgagccgcccaccagctccacgaacgggatgtcgcgaatgttgccggtagggctcacctggcgtaacgctcgcagggcgttggtgataaagacgcgtgatttggcgctacggcgaatggcgcgcactttctccagcggcagatcgccgggcaggggaaccagttcatccggtttcaccacgcagacgcgggcaaataccgtcggtggtaaggccgacggaaaaaactggacgctgccgtcttcatgacgcagatgaaacaggctttcgactttagccagcggatattttttgatctcttccgccaggtagcggtcctcaagccccagctcgcgggcgatgatcatcgtgaccatatcgccggcgccggccaggtgagtggcgctgatctctccctgcgcattgataatggaggcgtcggtcgacccggcgcccagatcgaggatcgccagcgggcgcgtggtgccgggagtggtgagcgccccaagaatggccgcctccgcttcggcgccgcccacctgaaccgcaatctgcagtttgtgctcaatttcacgggcgatgagggccatctgcaggcgatccgacttgaccatcgaggcgatacccaccgcctgctccagcgagaactctcccgcaagaccgccggtcacgctgactggcaccgccgtatcaacggccagcagatcctgaatgcggatctcctgagctggcttattggtaagctccgccatggtctggcgcacgtgctcaagcatgccgccgatattggtgcccgcttctcccgcgacgttgtccagtttgccgcagccgtcaaccgctttcatgatggcttccgccccggcggccacatcaacctgtacgctgcgcccctgagcgatgagcagcagattacctgccggaatagcgcgggccttgacgtcgccggagggggttttcaccaccacggccgagcggttgccaatcagcgcccgcgccattggcacgatatttttggtctcctcggcgttgagatcgaaaacggtcgcaataccgtaagggttggagagcgtttcgatgatcttaccgggtaaagcgacctcgacggccgccagcatgccaagtggaatccggtcgatatgctgaacttcgtcgatcaccggtagcggttgctgtagccggttattgaccagcacgccgtcatcctgctgcaaaataatgccggttatctgatagcccgctgccgttgccgcattgaccatcgcggcgacatcggcaaagtcaaaggccgaggagaccaccagaatatagggagtgtccgcggagcaggacagcagcgcctctggtgtgatggtgatgccgacccccagtccgacgccgccgggtgtcttcgggttatggccgatcatggtggactcggtgatgatggtttccgtgatggtttccatcgccacatcgccaatgaccggcgtggcttcgttaatgcgaataagcgaaatatcgctgagctgaatgccggccgcttttgccgcctgcgttagcgcctcctggataccgaacacatttcgtaatgtgccttttatacccgtggtttcagccaacgcgctgtggcgaatgttcagcacacctgcgtcatcgaccgtcgccagggcgacttctgtcgaggagttgccaatatcaatgccagcgatatagcgcatgcttacccccctgttaatcgtcgcctttgagtttcttacgctcgatgtacagcccggccgcttcccgaacaaaggcggcacagagtcgtgcctggtagcgatgctcgaggtcatcagcgatcgccagtagctccgcctgggtggaacggtatgggcgcagggcgttgtagatctcaaggattcggtcgtcgggaaccgcggtgagctctgcggcccgctcaaagttcatcgccagccgatcgcgtccggcatcctgggcgatcgccgcctgcatacgcagcgtttccggagtgatgcgcatgtcctgcgccgtaacgcgatcgcttaatacgttctccagcgtcaggtcatcgagcgttttattggtagcggttttgacccactccggatggcgggtcgctaacgggtagtcgctaacttttggctggcgaacggtgtcgtttgtcggcgcggctggcgcgggcgttatcccgtcctgtaggctgttcatccggctcagcacgtcgcgtaccatggattcaattgcgtcggtattcatcgggatatcctttgttaaagcgccacgcgcagttcctgcgggtttttgcccgtcaccacgtatttggtctctttaatgtgcaaaatggccgacttcgcctggtatttgggacgagccatctgatcgttaagcgtcggcaccggctgcggcgactcgcgtttggcgtagcgcgcggcgtttttgccaatctgacggtaggtttccagcgtcagcagcggcgcctgcgggaagagttccaggttggaaagcggcggcaggccgcgctggtggatgacggtggtgcctttcgactgaataccgatcgagatgccggagccgctcaggcggttgccttccactgccacgaaggcgacgtcagaagacttaaagcagcggatcacccgggctttgatgccttcttcctcaatgccggcgatcacttcgcgcagaatatttttatgcggaatgccgacgatattggcggtttgcgccagaccaaacgctggcccgacggcaataatgacttcatcctgctgcgtgccgggtttggcttcgccgatttccgtcaggaagctgtcgccggacacaggcgcaacggcgaccggcgcggcagaggcgacagaagccgcagacgcgctaaaggagaccggcttatctgcgcctgatttcatctccgacagcacctcttcgataatctggcgcagcagcgtttcgttaatttccatttttcaccccttagccaagttcattgggatcgagcgcgcccgggatatttttaatctcttcccagcgctcgccttgcaggcggtagcctgttgccggaccggcataatcgttcacgtcattcacggccgagagcacctggccctcgccaacaatgatggcggaggtatgcaggtagtcgccggtgagcttggctttctgaatattgagcatgtcctgggcgacatcggggaagccgcctttcgccagggctttcaccacctccaggccgttgcggttcttgttgatgatctcctgagcaaacttgatgtcctcgacgatattgcgctcaggcatatcttttgaaccgtgggcgtaggtagcggcttctacctcttcatccgtaataggcggcaaacccatgccggcaaataccgcctgcagcgcgcgggcggctttgttgcgaatggcgatcacgtcctcttcacgcaccggccgcaggccgccatcgaccttcaggtcgcgctggatcacgttgtagtcatcgaagtcttcggcatcttcgttggaaccggcgaacatgttgtcgtagttcggcaccgccgagtaaccggaggagataaagtcggttcctggcaggaactgcatcagcagacgcgcggtacgccgcatatccgagtgggtaaaggtttgatcgttgctggaggcgcactccagatccagcgctgagcagatcaggttttccgccagtacggcgcggatcccggacggcacggcggacggcacgccgatacagctgacggagccattctgcaggccttgcaccccggcggctttggtgatgtagatgcagcgcgcttcgagataaagcatcgatttgccttcggcatagcccatctgtacttcagaaccggaaccggaggtaaagcgcattttcaggccgcgcgaggcgtaggaggaggcgaggaagcctttcgaccatggagtgtcatcgccatcggtaaacaccggttccgtaccgtagaccgaaatggtttcggcatagcaggtgtggcccagcatgcccagtttcagctcggtggcttcttccagcgaacactgggtgaggacgccggggcggccaacctgtgaacccaccagcagggcgatggcgttgaacggcgcgtagcgcgccacggcgacggtggtctcctgttcgtcaaagccgcgccatgcgccttcagcggcgtcggcggcaatctgtaccggattatctttgatattagtgacatgcgcctgctgggacggcgtgcggcgggcgcgcattttttgcatcgccatcatcatctcgaccacgttcatatgcgacaccacttccacgattttcgccggggtcatcgcggtagtgagcggcacgatgtcgctgcgtttaacgttcgggtcgcagagcatgttggcgagcttaaccgaatccatggccatcacttcttcggcccgggcgagattaatgccgtagcgcgcgataaagtggtcaatcaggtcgaactgctcaaccggtttaccgtcgagttcggtcaccgcgccgttgacgatgcggatagaaggtttgggatcgttagggctttccatcgcgataaagccctcttcaatccactccttaacgaaaccatcctgattcacagggcgtttcgccagtgcttcaaatcttttcgatctcatgaatcagcctcgcgggtattaaatgtaggaggggcgatcgtttttcggttcggcgcccagcgtcgccagtacggttttgccgatttcccgggcggagatcaccgcctggcgcaccgcgccggagtcgccggaaatcaccagaatggcttcgttgctgaaactggtgccgtgggccggtgagctgtaagctaccacctcgacgttggctgatttcagcgcggtatcggccatcagcacgccaacggacgccggggcgccgacgataatgccgcaggcgcggcccagtggggcgccgaacgctttttccagggcataactggcgcgcgcggtatactgcagctcaatatgacccgcttcgttgccgtagacatcgccgaaggtacggtccagctctttcagcgcgacctcaatcccgcgtttgacgtcggaaacatcattcccgcccagcacaatcagcgagccatggccggcgccgcctttggtgtcgcgaggaagctcaatgctgaccacttcggtgttggtggctttgaccgcttcatcggcggccatgatgtgcggcccggcgccggtgcgggcgccgaggatgccgatagagcgatagcgtttttcgagcttcatcgcctccagcaacgcggcatccacgttggcgatgaccagcccgagggtgtcgccaatggcggtcccgacaaattccgttaagctgcagcttttctctgccatagccgtctctcctgtgggatggggggtatcgggaagcgcctgctgctctggcgtcgctacacgggctatgacttgcgccatgatctgttcaaccagctcattgctgctcattggctattccccttcggtaagattttttcaacatcggtatgggggcggggaatgacgtgtacggctttcacttcgcccacgtggcgggctgcggcggcaccggcgtcggtggcggctttaactgcccccacgtcgccacgcacgatgacggtcaccaggcctgaaccgatcctttcatagccaactaataaaacgttggccgacttaaccattgcgtcagcggcctctatggctgcggttaagcctttggtttctaccattcctaatgcttcttgttgcataaagacctcgcaggatatgtgccagtgagggaactatatggcggagcggcgaaaaagaatggctgagttgatggtggagagcgaaaaaatagtggtttttatataatataaaatggatttattttattttatatcgttgtttttatttgattttattgtttgtataaatgtgattatattgcaattaacgctccgtatttacattttaagaggtgattttttaaattgtttttgctatgcgatattttgcgtgatgtgatatttgttggaaaataagcactgcgctttcgcaattttttatcatttagttggaaattaaaataccccctgaacgcccgccattgctgcatggattcgcgaacaaatagcaataaattattcttcttcggcgactttacgccgcccgatttccgcaggatgccaacactttgccgctgccggtttctatagtgggcctcgccgtacccaacgagccagcggatggttggctggcctggacacgaacttcgtcacgaggtgtcacaatgaatggttctttacgcgcgcaatgtatcgccgagtttttaggcaccgggctgtttctgttttttggtatctgctgcctgagcgccctgaaactgaccggcgccagcctggggctgtgggagatctgtattatctggggactgggtatttctctggcggtgtacctgacggccggcatttcggggggacatctgaaccccgcggtcaccgtcgccctgtggctgtttgcctgcttcccgggcagaaaagtggtgccctatatcctggctcaggtcgccggcgcgtttggcggcgccgtgctggcctggatactttacagcaccctgtttacgcaatttgaaacggtgcatcatatggtgcgcggcagcctggaaagcctgcagctggccagtatattcagcacctacccggcgcctgagctcagcatctggcatgcggcgctggtggaggtggtgatcacctcgatgctgatggggatgatcatggcgctcaccgatgatggcaacggcgtacccaagggcccactggcgccgctgttgattggcattctggtggcggtgatcggcgcctcgaccgggccgcttaccggcttcgcgatgaatccagcacgcgattttggcccgaaattgttcacctggttcgccgggtggggcaatatcgccatgaccgggggaagagatattccctattttatcgtgcccattatcgcaccgttgttaggggcctgcctcggcgccgcaatttatcgttttcttatcgccaataatctgccctgtcatacctgcgtggaggaagaaaatacgcgttagcgtcataaggggaatgtatctgtgaaatagccaggctaatttcatgaaccgatatcacgaaccgctcaaaaagtctccccgggttgggagacttttgttattgtcaatgcacttttttatcgtcgatgggatctgatgctaaaaaaggtaaatatgaaaaatatgttttatttataacaaaaaattaactgaggggttttatcatgatttctgcgagtaccctaaactcagaactcatcaataaaatcgcacaggattttgcgcaagccaccagtctggcggttgtggtcgtcaatattcacggtgatgagatttctgaattgtttaatttcacgccgttttgccagctgatgcgtcagcacccggagcacagcggacgctgtcgcatgagcgaccgctgcggcgggctggaagcctcgaaaaaagaccagctgtgtatctaccgctgtcatgcggggttaaccgatttttccatcccgctggtgatcgccggccacctggtcggcttcgtgctgtgcgggcaggtgcgtctgagcaatgatgttgaactggttgatatcttgaacgtcgatgaccgctggcaggacgatccggcgctggtccaggcgtttcgcgatgtgccggagatggactattcgcgggttatcgcttcggcggatctgctgaagctgatcgtcgagaattgcctgaaaaaacagctcaactttgtggttatcaaagataacccgtcgcagaacgacccggcgcaggccagccgggcgccctcgccgcacgatggcaaaatgaagaaggcgctgcgctatatcgacgcgcatctctccgatgagctgcgtctggaggatgtggcggcgcatgtctatctcagcccgtactacttcagcaaactgtttaaaaagtatcaggggatcggttttaacgcctgggtcaatcagcagcggatggcgagcgcaaaagagctgctatgccacagcgactggagcatcgccagcatcgcgcggaatttaggtttttcgcaaaccagctatttttgcaaagtgtttcgccagacctatcaggtaacgccgcaggcatttcgtcagcaaattaatgccggatcacaaactgagtctttttaaatgacaatattttgctattgccgatttttgatatccccgagtatcttcatcaatataaaatgaaaaaaacgacagtagagcaataaattgtcatagcgcaacaaaatagtgatattcgagggataaactacaccagtttttatttttgtgatgagatagagtgtccgttaatacgagacagctgattatcacaacaccgctttccttcactgacgtcattgtgacgagtgatgaaacggtaaaagaaaacataaagtaatacccgtcgatgcagggcgcatcggcgaaacaaaccgacaggttcgacaccagtttggtgtcagggaagggggtgtaaatcccccgcagcccccgctgctgtgatgctgacgaccccgcaaaaaccactgatcgaaagattgggaagggcgggcgagaacgaggctaagccagaagacctgcctgccggtaactgaccaacaacttcggtgggaagtgggtggcttagcggtgcgtggtcgcaggaccaggcatgcgcgtagctataccctgcccgccagaacaggacagggtatggcaaccaggcgtgcgttcattcttgcgggtaccggcagcggttgtggcaaaaccaccgttacgctcggcctgctcagcttgctccaacagcgcggtatgcgggtgcaaccctgtaaagtagggcctgactacctggataccgcctggcacaccgccatcagcggcatcgcttcccgcaatctcgacagctttatgcttcccgccccgatactcaacgcgctgtttaccgaacagctacagcaggccgacatcgcggttatcgaaggggtgatgggcctgtatgacggctacggcaccgaccccaactactgcagcagcgcggcaatggctaagcagcttggctgcccggtgattttgctggtggatggcaaagcggtgtcgacctccatcgccgccacggtgatgggttttcaacattttgatccggctctcgacatcgctggcgttatcgtcaatcgggtcaacagcgacgcgcacttccagctgctgaaaagcgccattgagcgctactgtcaggtgccagtgctcggctatgtgccgcgcgtggaaggcgtggcgctgcccgaacgacatctgggactggtgaccgcccgcgagtcggtggtcaatcagcaggcatggcgggattttgccagcctgctggggcgcaccctcgacatagaccggctgctggccctcagcgaactggccgccatgccgatcggcgagtggggagaacagcttgccgccgatgccggcgaaggactgacgctggccctcgccgacgatgaggccttcaatttttattaccccgataacctggcgctgctggcgcgctgcggcgtgaagatggtgcgctttagcccactacgcgatcgccagctgccggcctgccagatgatctggctcggcggcggctatccggagctgcatgcggccgggctatccgctaaccacgagatgctgacacagcttcgcgcggcgcaccggcgcggggtggcgatctacgccgagtgcggcggcctgatgtacctgggcacgaccctggaagtcaccagcggcgagcgctacacgatggcggatattattcccggacacagccgaatggggacgcgtctgacccggttcggctactgcgaagcgcaggcgcagcagcagacgctgctggcagcccctggcgagtggctgcgcggccatgaatttcattactccgatttttctcccgccacccccgccgtactggcctgccgtaaacagcgagacggtaagacgctccagcagtggcagggaggatggcagttcggcagcgcctttgccagctatctccatgtccattttgcccagcgtcccaccatgctcaaccactggttgcgggcagcaaggagggcgctatgacccttctcgcctggtgtgtagcctggatacttgatgtcgtcattggcgatccgccgcactggccgcatccggtgcgctggataggtcgcctgatcgccgtcagccagcgtgtagtgcgacgcgtctgccatagcgaccgggcgctgcgcatcggcggcggggtgatgtggctggtggtgatcggcctgacatggggcgtggcctggggcgtactggcgctggcgcacgggatccacccctggcttggatggctggtggaagtgtggatgatcttcaccgcgctggcgggacgctgtctggcacagtcggcgatggcggtggcccggccgctgcaggccggagatctcgccgaaagccggcataagctctcctggattgtcgggcgcgataccttccagctccagccagcgcagatcaaccgtgcggtggtggagaccgtggcggagaacacggtggatggcattatcgcgccgctctttttcctgctcctcggcggcgcgccgctggccatggcctataaagcggtcaacaccctcgattccatggtcggctataaacacgaaaaataccgggcgatcggcatggtcagcgctcgtcttgatgatgtagccaacttccttcccgcccggctgagctggctgttgctcagccttgccgcggtgctatgccgggaagatggcgcccgggcgctgcgtacgggctggcgcgatcgctatcagcacagcagtcctaactgcgcctggccggaagcgaccgtcgccggcgcgctggggatccgccttggcggcccgaacgattacttcggccagcgcgttgaaaagccctggataggcgacgccgtccgcgacatcgcggtggacgatatttcccgaaccattcgattaatgtgggtggcgtcaagcctggcgctggcgctgtttatcggcgtgcgctactggctggtcggcgcggcctgaggagaacctgatgcagtacatccaacaaccgcaggcgatcgaggcgaaaagcttcgacatcatcagcgagatcatcgccgaaacgcgaccggactaccgtttcgccagcccgctgcacgaggcgattatcaagcgggtgatccacaccaccgctgacttcgactggctggatattctgtggttttctccggatgccctgatcgcgctgagtgaggccttgagccggccctgcacgctgtataccgataccaccatggcgctgtccgggatcaacaaaaccctgctggcccgctttggcggcgaatgccgctgctatatcagcgacccgtgggtggtgcgcgaggcgcaaagccgggggatgacccgctcgatggcggcggtggatattgcggtgcaggagcccggggagaaagtgttcgtcttcggcaatgcgccaaccgcgctgtttcgcctgctggaacatcgcgagaccgccatcggcggcgtggtgggggtgccggtcgggttcgtcggcgccgcggagtcgaaagcggcgctcagcgagagcggcctgccggccatcgccgcgctcggccgcaaagggggaagcaacgtggcggcagcgattgtgaacgctctgctttaccacctgcgggaggcgcaatgagcgatcagacctttgacgccccggtgtggcatcacggcaaagcgctgcgcaagggctacaccaccggctcctgcgccacagcggcggcaaaagtggctgcgctgatggtgatgcgccagcatctgattcatcaggtctcgatcgtcaccccctccggcgtcaccctgtgcctgaacgttgagtccccgcacgtcgaagggcagcaggcggtcgccgcgatccgtaaagacggcggcgatgatgtcgacgccacccacggcatgctgatttttgcccgggtcaccctcaatgacagcggagagattagcctgcagggcggggagggtatcggcacggtgacccgcaaagggatcggcctgccgacaggcagcccggcgataaaccgcactccgcggcacaccatcgagaccgccgtgcgcgaagcgataggtcctacccgcggcgcgcaggtggagatttttgccccggaaggcgcgcttcgcgcgcaaaaaacctataacgcccggctggggatcctcggcggcatctcgattatcggcaccacggggatcgttaccccgatgtcggaagagagctggaagcgctcgctctccctcgagctggagataaaccgcgccgccgggctggagcgcgtggtgctggtgccgggcaaccacggtgagcgctttgtccgcgagcagatgggcatcgacccgcagatggtggtcaccatgagcaacttcgtcggctacatgattgaagaggcggtccggctcggtttccgccagattgtgctcatcggccatcccggaaaactgatcaaaatcgccgccgggatctttcatacccacagccatatcgccgatgcgcggatggaaaccctcgtcgctcatctggcgctgcttggcgcgccgctgccgctgctgacgctggtcagcgagtgcgacaccaccgaagcggcaatggagcatatcgacgcctggggatatcagcgcctctataaccatctggctgagcgaatctgccagcgtgttcttgagatgctgcgcttcactcaacaaccgcccacctgcgacgcgattctgttttcttttgataaccaggtactgggcagcagccgtccgctggcggcgattgcccgggagctgacatgttgacggtcgtgggaatgggcccggcggggctgcagtggctgaccccggccgcgcgcgaggcaatcgccgccgccgaggcgctggtgggcggcagccgtcatctccagcagtttcccgacttcgccggcgagcgcttcgcgctgagggccgatatgccggcgctgctggcgtggatcgaggcccgtaccgggcgccgcgtcgtggtgctggcctctggcgacccgctgttctatggcattggcacccggctgattgcccattttggccgggaacgagtgcaggtgatccccggcatcagcgcggtgcagtacctctgcgcccgggcgggcatcgacatgaacgatatgtggctgaccagcagccatggccgggcggtgagcttcgatgctctggccgcccaccggaaagtcgccatggtgaccgacggccgctgcggaccgcgggagatagccgcccagctgatggcccgcggcaaaggccatcgctggatggtgataggcgagaacctggcgatggaaaacgagcggatccactggctgccggtcagcgccgtggaggacgaatatgagatgaatgcggtggtgatcctcgatgaaagatgagctgtttttgcgcggcgcccaggtgccgatgaccaaagaggccgtgcgcgcgctggcgctggcgaagctggagctgcaccgggcgcgccatctgattgatatcggcgcgggcaccggcagcgtcagcattgaggctgctctacagaacccggcgctgcgggtgacggcgattgagcgtcaggccgacgcgctgcgcctgctggcggagaaccggcagcgctttggctgcgacaacatcgctatcgtggcgggcgttgcgccgctggcggtcgccgacaaagccgacgcgatctttatggggggcagcggcggccacctgacggcgctgatcgactggtcgctggcgcagctgcatcccggcggccggctggtgatgacttttattttgcaggaaaaccttcatagcgctctggcgcacctgcggcagagcggcatccacgaggtggactgccagcagctggcggtctccaccctggctaccctgggcagcggccactacttcaaaccccataatcccgtttttgtcatcgcctgtcagaaggaagaaaaccatggctgagacttttgatccccattgcgtgtggttcgtcggcgccggtccaggcgatcgcgaactgattactctcaaaggctaccgtctgctacagcaggcgcaggtagtgatctacgccgggtcgctgatcaacaccgagctactggcctactgtccgccacaggcggagtgccatgacagcgccgcgctgcatctggagcagatcctcgacctgatggaggcgggggtgaaggcgggaaaaacggtggtgcgtctgcagacgggcgacgtctcgctatatggctcggtgcgcgagcagggcgaagagctgacccgccgcgggatccgctggcaggtggtgccgggcgtcagcgctttcctcggcgcggcggcggagctgggggtggagtacacggtacccgaagtctcgcagagtctgattattacccgtctggaagggcgcacgccggttcccgcgcgcgaacagctggaagcctttgccagccatcaaacctcgatggcgatttacctgtcggtgcaacgtattcaccgggtggcggagcggctggtggagggcggctaccccgcgaccaccccggtcgcggtgatctacaaggccacctggccggaaagccagaccgtccgcggtaccctcgcggacatcggcgacaaagtacgcgacgccgggatccgcaaaacggcgctgatcctggtcggccccttcctcggcgatgagtatcactactcaaaactgtacgcagcggattttagccatgaataccgtaaagcctgaatccattgccctgttttgcctgacgcccggcggcgtgcggctggcaaaacggctggcggccatgctgccgcttacctgttacaccagcgaagcgctgcaggaagaggggtttatccccttcaacggcggctttgccagcgctgcccgcgaggcgttcagcagcttctcggcgctgatttttatcggcgccaccgggattgccgtgcgggtgctggccccgctggtgaatgacaagctcagcgacccggcggtggtggtgattgatgagcgcgcccggcacgtcatcagcttgctctccggccatgccgggggggccaatgcgctgacccgctatctcgccgggatgctcgacgccgacccggtgatcaccaccgccaccgacgtcaacgagctggccgccctcgacacgctggccttccagctgaacgcccggatgaccgattttcgcgcggcggtgaaaaccgttaaccagatgctggtgagcggtaagcgggtggggctgtggtgcgacggcgaatttaccggggcgctaagccgctgcgaccggcgcgggtttatcccggtaagcgacctggcgcgcttgccggcgctcgacgccctgatctgcgtcaccctgcgccggtcgctgccgccgctgccggtgcctcactggaagctggtgccccagcgggtggtggcggggatcggctgtcggcgcgacaccccctgcgcgctgctcagtacgttgctggatcgccagcttgccgctcagcgtcttgacccgctggcgctgaaagcgatcggcagcgtgagcctgaaggcaaacgagccggggttgcgccagctggctcaccgctgccgggtgccgttcgaaacctttagcgccgaggcgctgcgcgagcacgagcaccgctttccggcctcgtcttttgtccgggagacggtcggcgtcggcagcgtctccggcccggtggcctggctgctgagtcagggaaacctgtccggcgaaaccctgcgtgagcagggcgtgaccattactttgggagtaacacactgatgttaagcgtaatcggaattggccctggctcgcaggcgatgatgaccatggaagccgtggaggccctgcaggcggcagagatcgtggtgggctacaagacctacacccacctggtaaaagcctttaccggcgacaagcaggtgatcaaaaccggcatgtgcaaagagattgagcgctgccaggcggccatcgagctggcgcaggccgggcacaacgttgcgctgatcagcagcggcgacgccggcatctacggcatggcggggctggtgctggagctggttaataagcagcagctggacattgaggtccgtctgatcccagggatgacggccagtatcgccgccgcctcgctgctcggcgcgccgctgatgcatgatttctgccatatcagccttagcgatctgctgacgccctggccggtgattgaaaaacgcatagtcgccgccggggaagcggacttcgttatctgtttctacaacccccgcagccgcggccgcgaaggacatctggcgcgcgcctttgcgctgctggcggccagtaaaagcgcagatacgccggtcggcgtagtcaaatccgccggacgcaaaaagcaggagaaatggctgaccaccctcggggagatggattttgccccagtggatatgaccagtctggtgatcgttggcaacaaagcgacttacatcgacaacggcctgatgatcaccccgcgaggctacgcgctgtgaatcacggcgacgtgctggttatcgggggcaccagcgatgcgcgggcgatctgccagcagctggacgccgccgacgtgcgctacaccctgtcggtggcgacccctaccggcgagcggctggccggcgatatccgcgggcagatacgctgcgggcgaatggagtggcagcagatggcggagtggctcagagcgcagcgcacccgctgggtgatcgatgcctctcacccctacgccgaggtggtcagccagaatattgtgcgcgcctgcgctagcgtcggggttctgctcagccgctatcaaaggccggagcagctgagcgatctgcgccatccgctacttcacgtggtcggcgatctgaacgaggcctgcgcggtggctcgtcgcttcggcgagcggatcctgctgaccaccggcagcaaagatctggcggcctggcgggcgggactggcggagaaaacgctgctcgcccgggtgctgccggtgccggaggtggttcagcactgtagcgatctggggtttggcgtcggggagatcttcgccctctgcgggccgttcagcgccgaatttaacgccgccttttatcgccagtgccgggccgatgttgtggtgacgaaagcctcgggggcggaaggaggctatcaggaaaaagtacaaccctgtcttgatgcggggatcccctgcatcgtcattacccgtccggcgccgctggtgacgggcgatgaactactgcaaagccaggccgatttcactgcgcggctgacgcgctggctgtcggcgacttgaggaagaggatatgaaaaaagcacttctggtggtgagctttggcaccagctatcacgacacccgcgaaaagaacatcgccgcctgcgagcgcgatctggccgccagctgcccggaccgcacgctgttccgcgccttcacctcggggatgattattcgcaaactgcagcagcgcgacggtattcatatcgatactccgctgcaggctctgcaaaagctggccgagcagggataccaggatgtggcgatccagtccctgcacattatcaacggcgacgagtacgagaagatcgttcgcgaagtgcagagcatgcgcccgcgctttcagcgtctgacgctgggcgcgccgctgttgagcggtcatggcgattacgtgcagctgatgcaggccctgcgccagcagatgccaacgctggcggcgacggagcgagtggtgtttatggggcacggcgccagccaccacgccttcgcggcctacgcctgtctggatcatatgatggcggtgcagggttttccggcgcgggtgggggcggtggaaagctatcccgaagtggacatcgtcattaacgaactctcccgccagggcgtgaccggcgtgcatctgatgccgctgatgctggtggccggcgatcatgccattaatgatatggcctccgacgaagacgattcgtggaaaacccgcttcaatgccgccgggatccccgccacgccgtggcttaacgggttaggggagaatccggcggtgcgggcgatgtttgtcgcccatctgcagcaggcgctgaacgacacgatggagaaagcagcatgagcggcaaactatacgccctgagcagcggcccgggggcggccgatctgatcaccgtgcgtgcggcgcggatcctcggccagctggatgtgctgtatgcgccagccggccgcaaaggcggcgacagcctggcgctctccatcgtacgcgagtacctgggcgcacacacggaggtccgctgctgccattttccgatgagcgccgacagcgcggaaaaagaggcggtgtggaacgacgttgccgcggcgctggcccaggaggtggcggcgggcaggcaggtcgggtttatcaccctcggcgacgccatgttgttcagcacctgggtctttctgctgcagcggattggctgcccggagtggctggagattgtccctggcgttacctccttcgccgccattgccgcacgggcgaaaaccccgctggccatggagcagcagtcgctggcggtgatctcctgcaccgcgccggaagcggacattgccgcggcgctgcgccagcatgacagtctggtgctgatgaaagtctacggccgcttcgcccgcattaaggcgctgctggcgcaggcggggctgctggatgcggcgctgatgatgtcagaggccaccctgccgggcgagcagtgctggcgccgtctgcgcgaggtcagcgatgaccagccgctgccctatttctcgaccatcctggttaacaaacagtgggaggaggcgtaatgaatcaggtgaaatcgctgaagcagctttcgtatggggggctggcggccgctgttctgctgatcatcgtcccgcaggaggcgttcgccatgcatatcatggagggctttttgccgccgatgtgggcgctggcgtggtggctgctgtttttaccctgcctgtggtacggcctggtgcgcctgcggcgtatcgttcaggaagagagcaatcagaaggtgctgctggccctctgcggggcgtttatttttgttctttcggcgctgaagatcccatcggtgaccggcagctgctcgcatccgaccggcgtcggtctggcggtgatcctcttcgggccgggcgtggtggcggtgctgggggcgatcgttctgctgttccaggcgctgctgctggcgcatggcggcctgaccacccttggcgccaacgggatgtcgatggcggtgatcggcccgatggtcggctatctggtgtggaagctggcctgtcgggcggggatccgtcgcgatgtcggggtctttctctgcgccatgctggcggatctgatgacctactttgtcacctccgtccagctcggggtggcctttcccgatccggcaaccggggcaggtggatcgatcgccaagtttatgggcatcttctgcctgacgcagatcccgatcgccatcgcggaaggcttgctcaccgtgatgatctacgatcagctaaccaaacggcgactgatcgccgcggagggacattaatatgaaaaagaccctgatcctgttggcgatggtggccgccctgatgatcctgccattttttattaaccacggcggcgagtttggcggctcggacggtgaagcggagagccagatccaggtggtggcgccggattatcaaccctggttccagccgctatatgaaccggcgagcggcgagattgagagtctgctgtttaccctgcagggctcgctgggcgcggcggtgattttttacattctcggatatgcgaggggcagacagcgccgtgatgaccgggtttgaccgactcagctaccagagccgctggctgcaggtggcgccagagcggaagtttctgctctggctactgctgatggcgctggcctttacgctgccggcgtggggccaggcgctgacgctggcgctgaccgccgcgctgacctgctggctgctgcgggtctcattctggcgctggtgccgctggatggccctaccctttggctttttgctggtcggcgtgctgaccattgtgttcagcgtcagccgcgacccgcagatgctgttagccagcatccgactgggcgctttctcgatagggatttccgccccggggctggccgtggccggggagaccttctggcgcagcctggcggcgatagcggcgacgctctggctggtgcttaatctgcctttcccacagctgattattttactcaagcgcggtcgcgtaccgcggctgttgacggagcagatcctgctgacctggcgcttcatttttattctgttagacgaggcgatggcgattcaccgcgcgcaaactctgcgttttggctatggtagcgtgccgcagggctatcgctcgctggcgatgctggtgggactgctgttcacccgcgtcctcctgcgctatcagcagatgagcacggcgctggatatcaaattgtaccagggtgattttcacctctaaggataagtatgcttgccacaaccgatctctggtttcgctatcaggatgagccggtacttaaagggctgacgctggatttttcccgccatgcggtgaccggcctggtgggggccaacggctgcggaaagtcgacgctgtttatgaacctgagcggcctgctgcgcccgcagcaggggggggtgctgtggcagggagaggcgctgaattacagcaagcgcggtctgctggcgctgcgccagcaggtggcgacggtgtttcaggatccggatcagcaaatcttctataccgatatcgacagcgatatcgctttcagtctgcgtaacctcggggtggcggaagaggagatcgcccgccgggtggatgaggcgttgaccctcgtcgatgcccaggggtttcgccagcagccgatccagtgcctcagccatgggcagaaaaaacgggtggcaatcgccggggcgctggtgctgcaggctcgctacctgctgcttgacgagcccaccgcgggcctcgatccacgcgggcgggcgcagatgatcgccatcatccggcgcattgtcgggcaggggcggcgggtggtgatctccagccacgatatcgatctgatctatgaggtgagcgacgccgtttacgttctgcgtcacggcgaagtactggccgcgggggatcccggcgaggtatttgcctgcgcggagacgatggacagggcgggattgacgcagccgtggctggtgaaacttcatagcgaactggggctgccgctgtgtaaaaccgaggcggagttttttcagcggatgcacaacaacgcgataggcgcgataaaggaggcgtcatgacgctggcagtgatgttgcagggcacggcttccgacgttgggaaaagcgtgctggtggcgggattgtgccgcatttttcatcaggatgggctgcgtaccgcgccgtttaaatcacagaatatggcgctgaactccggcattacgccggatggcaaagagatgggccgggcgcagattttccaggccgaagcggccgggattgcgccggatgtccgcatgaatccgattttgctcaagcccaccagcgaccgtcaggcgcaggtggtgctgatggggcaggtggcgaccagcatggatgcggtgagctatcaccagtacaagccgcgcctgcgcgagcagatcctcgcggtctaccagagcctggccggagagtatgaggcgctggtgctggaaggcgccggcagtccggcggagattaacctgcgcgaccgcgatatcgtcaatatgggcatggccgagatggcgcaatgcccggtgatcctggtggccgatatcgaccgcggcggggtgtttgccgcgatttacggcacgctggcgctgctgcagcctcaggagcgggcgcgggtgaaaggggtgatcatcaataaattccgcggcgatgtggcgctcctgcgctccgggatagagcaaatcgaggcgttgaccggggtgccggtgctgggcgttatgccatggcttgacgtggatctcgaggatgaggacggcgtcgcgctgcaggccgggaaataccatcgcaccgaccggcgcgatatcgacatcgccgtggttcacctgccgcatatcgccaattttaccgactttaacgccctggcggcacagccagatgtccgggtgcgctatgtccgcgatccgcaggcgctggctgacgccgacctggtcattctcccgggcagtaaaaataccctcggcgatctgtgctggctgcgcgagagcggcatggcgcacgcggtcgagcaggcccggcagcgcaaggtgccgctgctggggatctgcggcggctatcagatgctgggcgaaaccattatcgatgaggtggagtctggccttggcgcccagcccgggctgggggtgctgaagaccgtgacccacttcgcccagcacaaaaccaccacccaggtgcaggcgaccctggggtctgcgctcccggattggttagccgacgcggcggggctgcgcgtcagtggctacgaaattcatatgggcgagacgcgccgcgaggcaggctgcccgccgctgctgcagctgcataaagcggggcaggcagtggacgacggggcgataagcgacgacggcctggcgttcggcacctatctccatggcctgttcgacagcgatgactttacccgggcgctgctcaacggcctgcgccagcgcaaagggctggcgccgctggacagcgccctggagtatgcccgctataaaacccggcagtttgatcggctggccgaggccatgcgcgaacatatcgccatcgataaaatttacgccatcatgcgccaacatcaggagcccctatgctgactctggttaccggcggcgcgcgcagcggcaaaagtcgccatgccgaggcgctgattgccgatgcgccgcaggtgttatatatcgccacctcgcaaatctttgacgacgagatggccgcaaggatccagcatcatcgcgacggcaggcccgcccactggcgcaccgccgagcgctggcagcagcttgatgaactgatcaccccggctatcgccccagcggaggcgattttgctggaatgcatcaccaccatggtcaccaacctgctgttcgcgctcggcggcgacagcgaccccgacggctgggattacgccgccatggaacaggctattgatgacgaaattggcgtgctgattgccgcctgtcagcgctgtccggcgcacgtcgtgctggtgaccaacgaggtggggatgggcattgtgccggagaaccgcctggcgcggcattttcgcgatattgccgggcgggtcaatcagcgcctggcggccgcggcggatgcggtctggctggtggtctccggcatcggcgtcaaaatcaaataactcaatcgctggctgaccgggccagccctggcagggattctgtatgcaaaatttaaacacggttctgcgggcgatccccgcgccggacgccgactccatggcgcgggcacagcaacacatcgacggcttactcaagccccccggcagcctcgggcgtctggaggcgctggcggtgcagctggcgggaatgcccggcctgggcggccagccgcaggtggcgaaaaaggccctgctggtgatgtgcgccgaccatggagtgtgggacgaaggggtggcgatttcgccgaaggcggtcaccgccatccaggcggcaaatatgacccgcggcaccaccggcgtctgcgtgctcgccgcccaggccggggcgaaagtgcatgtaattgatgtcggtatcgatagcgaaccgctccccggcgtggtgaatatgcgggtggcgcggggctgcggcaatattgcccgcggtccggcgatgagccgtgagcaggggcaggagctgttgctggaggtgatgcgctacacccgcgcgctggcccaggagggtgttaccctgtttggcgtcggcgaactggggatggccaataccacgccggcggcagcgatcgtcagcgtcctgaccggcagcgatgcgcaggaggtggtcgggattggcgccaatctgccgctggcgaaggttggcaacaaggtggaggtggtgcggcgggctatcgccgtcaatcagcccgacccgaatgatggcctcgacgtactgagcaaagtcggtggtttcgatctgctggggatgaccggtgtcatgctgggggcggcgtcctgtgggctgccggtggtgctggatggctttctctcctacgcggcggcgctggcggcgtgtcagatagcgccggaggtgaaaccgtatctgatcccgtcccattattcggcggagaagggggcgcgtatcgcgctggcgcacctgggtctcgaaccgtatctcaatatgggcatgcgtctgggagaaggcagcggcgcggcgctggcgatgccgatcgtcgaggcggcctgcgcgatgtaccatcgcatgggcatgctggcggcaagcaatattgtgttaccgaaggggtaagcaggagatgggggcggcaatggccgttcccgttttcggcagaggttttgccggcggcagaaacaaaaaacacccttgagggtgtttgtaatgttggttgcgggggccggatttgaaccgacgaccttcgggttatgagcccgacgagctaccaggctgctccaccccgcgtcaccgtactgcttcactttgtcaaatttgattggttgcgggggccggatttgaaccgacgaccttcgggttatgagcccgacgagctaccaggctgctccaccccgcgtcaccgtactgctttacttcatcaaattttaattggttgcgggggccggatttgaaccgacgaccttcgggttatgagcccgacgagctaccaggctgctccaccccgcgtccgtggaagcgcactatactccgctagcgagatgatgcaaccttttttcgaccaaatcgacatttttgtaagaattggcttataaaacgccatgttgtggtgtttttttacacaaatctgtgccatcgatgagatcgcgcatttcaatagctccggcgctttgttatcttcaacacgcactaaggcttcgcagcaaaagatgagacaccatgaaaggacgttgggcaaaatatgtagcgacgggggcaatgctggccatgctcgccgcctgttcctcaaaaccgaccgaccgcggtcagcaatatagcgatggcaagttcacccagccgttttcactggtaaaccagccggatgccgtcggggcaccgatcaacgccggcgacttctccgagcaggttaatcaaattcgtaacgcctcgccacgcctctataatagccagagcaacgtctacaacgcgctgcaggagtggctgcgcgccggcggcgacacccgtacgctgcgccagtttggcatcgacgcttggcagatgcagggcgtcgacaactatggcaacgtccagtttaccggctactacacgccggtggtgcaggcgcgccacacccgtcagggcgaattccagtaccccatttaccgtatgccgccgaagcgcggtaagctgccttcccgcgccagcatctatgccggcgcgctgagcgataactatgtgctggcgtacagcaactcgctgatggataacttcatcatggacgtgcagggcagcggctatatcgactttggcgatggttcgccgctcaacttctttagctatgccgggaaaaacggctggccctatcgcagcatcggcaaagtgctaatcgaccgcggggaagtgaagaaagaagatatgtcgatgcaggcgatccgcgagtggggtgagaagcacagcgaagcggaagtgcgtgagctgctggagcagaacccgtcgttcgtgttctttaaaccgcagtctttcgcgccggtgaaaggggccagcgctgtgccgctgatcggccgcgcctcggtggcctccgaccggtcgattattccgccaggaaccaccttgctggccgaggtgcctctgctggataataacggcaagtttaacggccagtacgaactgcgcctgatggtcgccctcgacgtcggcggggccatcaaaggtcagcatttcgacatctatcagggcattgggcctgacgcgggccaccgtgccggctggtataaccactacggccgcgtatgggtgctgaaaaacgccccgggcgcggggaatgtttttagcggctaactcccctggccatgcctgttgaccagggcgcccggatgacgccgtttacggcggcctccgggcgctgtcattttgttctgaggttctatgtctgttgtaatcagcgatgcctggcgccagcgttttggcggtacggcacgtttatatggtgaaaaagcgctgcaatgttttgccgacgcccacgtctgcgtggtcgggatcggcggggtcggctcctgggcggcggaagcgctggcgcggaccggcatcggggcgatcacccttatcgatatggacgatgtctgcgtcaccaacaccaatcgtcagatccacgccctcagcggcaacgtcgggctggcgaaagcggaggtgatggcggagcgtattcgtctcatcaacccggagtgtcgggtgacggtggtggatgatttcgtgaccccggaaaacgtggcggaatatcttggcgtcggctttagctatgttatcgacgctatcgatagcgtccggccgaaagcggcgcttatcgcctggtgtcgccgctacaaggtgccgctggtgactaccggcggggcgggcggtcagattgacccaacgcagatccaggtcgcggacctggcgaagaccatccaggatccgctggcggccaaactgcgcgagcggctgaaaagccagtttggggtggtgaaaaacagcaaaggtaagctcggtgtagactgcgtcttctctacggaagcgctggtctacccgcaggcggacggcagcgtctgcgcaatgaagagcacggcggaagggccgaagcggatggactgcgcttccggctttggcgcggcgacgatggtgaccgcgacctttggcttcgtcgcggtgtcgcatgccctgaagaagatgctggcgaaggcggagcggcagacgacgtaaatcccgggtcgcggcgcaggcgccttacccggtctacaggacaattccccggaggcggcgctgcgcacctgtccgggcgacaaaactgcacgagcccgtagcccgggcaaggcgcgtcaagcgccgcccccgggatgagcttaaacctcaacctcgcgggcggcggcgagcaccgcctcgctgagggcgctgaggccctggctgcgcgaggcgctgagctggccgcgcagccccagctcgtcgaacagcgccagcggatcctgcgccaggatcccggcgcgggtttttccttccacggcggttaaaagtaccgccagcagaccgcgcacaatccttccttcgctgtcgccaaagaagtgcagcctgccctcggcgtcctcctcatagcccagccagacgcggttctcacagccggcaatctcatgggcctgcgctttgcgctcgtcggtcagcgtcggcagctttttgcccaataaaatcagctgacggtatttatcctcccactggttcagcggggcgaagatctggcgcagcgtagcgtcggtaatggttgtgccgaaggggtgcagagttgtcattaatccaccagaatttccagggcgcgatccaccgcgtggaccagcgccgcaacatcgtcttgggtattgtagggggcgaaagaggcccgcagggtgccgctgacccctaaggcagccagcagcggctgggcgcagtgttgtccggcgcgcagggcaatgccggactccgccagcagcgtcaccagatcgctgtgatgaataccctcaaattcaaaggccagcaggcttgactgctggcagcggaaagagcggaagcccggccgtttcgccagttcctcttccgccaggctcgccagactgcggctccagttttccgcctggccgatatcgctctgcgccagccactccagcgcggcgctgaggccgataaccccggcgacattcggcgtaccggcctcgaggccatagggggccggctgcggcgtaaagccgtcaaagctgacctcggcgatcattttcccgccgccgagccagggcgacatcgctgccagcagctcgcttttgccgtacagggcgccgatcccggtcgggccatacagcttatggccggaaaaggcgtaaaaatcgatatccagcgcctgcacgtcagcggggaaatgcaccgccccctgggcgccatcgaccatcaccaccatcccggcggcgtgagcaaggcggatagcctgcgccaggtccgggcagccgccggtgacgttggacatctgaccgatggccagcacccggctgcgcggggtaatcagcgcgctgaggctggcgatatccggcagacggtcggtgccaagcggcagtttgaccactctggcgccggtctgcccggccaccatcagccagggcacgaggttggcatgatgctcggcttcgctaacgataatttcatcgccaggctgcaggcgcggccggacgtagctctgcgccaccatattgatggcctcggtggtccctcgcgtccagacgatatctttgccggacggggcgttaagccacgccgccacgcgatcacgggccgcctcgtagcgctcggtcagccgctgggcggcggcgaactggctgcgatggacattgccggcgctcaggcgataaaactggtcgctggcgtcgatcaccgccagcggtttgagcgctgtcgccgcgctgtcgagatagacgccggcatcggccagagccggaaactgcgcgcgaaagtgcgccgggttaaatgcgttcatggaattcctcgtatcaataccgcgatcgtcgcgcaatttgccgggcgtgacaaggtctctgcgtcctgtggaattgtccgaatgtgactccacgtcggtcaaagagggttatgctgaaaagtgttgggtttgtgttttaacctattacttaacgagttacgaatagtataaatagccgtaaggagagaagaatgaaaatgactaaggccgctgcgattatctctgcctgtatgctgactttaggcctgagcgcctgttcctctaactatgtgatgcataccaacgatgggcggaccatcgttaccgacgggaaaccgcaaaccgataatgacactggcatgatctcgtataaagacgcgtggggcaacaaacaacagatcaatcgctctgacgtgaaacaactgggtgaactggacgagtaaggcagtaaaaaggcaaaaaaaagcaccgcgcgttgcggtgctacattaaatcactatggacagacagggtaaatgtacaggaagtgaaaaggggtagctttgctaccagggtctgcaaaaacagaccaattgcaaacgcaacaacacaacatcacaaccgtaagccaaaagcttgatggaacacgcattccaaaaaaagcttctcgttccggctcaggaagtgccgccactataggtatttgctggtagaacctcaacggacaatttataatggctcagataaaaaaaactaataggttaatcattgtttcctatttgttaaattgagttaacatctaagccagaataaccatgtcgaagcgattaccacctctgaatgcattacgtgtttttgatgcagccgcacgtcatctcagcttcactcgggcagccgatgagctttttgtgacgcaggccgcagtcagccatcaaatcaagtctctcgaggattttctgggccttaagctgttccgtcggcgcaatcgttcgctgctgttaacggaagaagggcagagctattttcaggatattaaagagattttttcgcaactgacggaagcgacgcgtaaactgcaggcgcgcagcgccaaaggggcattaacggtcagtttattaccaagtttcgccattcagtggctggtgccaagactaacaagctttaactcagcttatccgggaatcgacgtcaggatccaggcggtggaccgtcaggaggataagctggcggacgatgtcgatgtggcgattttttacggccgcggcaactggccgggcctgcgtgtggaaaaattgtacgccgagtatctgctgccggtctgttccccgctcttgctcaccggcgacaaggcattgaaaacgcctgccgatctggcgcaacataccctgcttcacgatgcgtcccgccgcgactggcaaacttatacccgtcagcttggtctaagccatattaatgtgcagcaggggccgattttcagccatagcgcgatggtgctgcaggcggccattcacgggcagggcgtggcgctggccaacaacgtgatggcgcagtccgaaattgaagccggtcgtctggtgtgtccgtttaatgatgttctggtcagtaagaatgcgttttaccttgtttgccatgacagtcaggcagaactgggtaaaatagccgctttccggcagtggatcctggcgaaagcggcaagtgaacaagaaaaattccgctttcgttatgaacaataattacttgtagggtaacaacatgaccagccgttttatgctgatattcgccgcgattagcggctttatctttgtggctctgggcgcctttggcgcgcatgtcttaagtcaatcgctcggcgcggcggagatggcctggatccataccggcctggagtatcaggccttccataccctggcgatttttggtctggcggtggcgatgcagcgtcggatcagtatctggttctactggagcagcgtatttctggcgttagggaccgtgctgttcagcggcagcctctattgtctggcgctctctcatttacgtctgtgggcgttcgtgaccccggtgggcggcgtaagcttcctcgccggttgggttttaatgttaattggtgcaattcgtctgaaacgtaagggcgttgttcatgaataaggttgtcctctattgtcgccctgggtttgagaaagagtgcgcagcagaaattaccgataaggcagcccgccttgaggtgtttggttttgcccgggtcaaagaagactctggctatgtaatttttgaaggttatcagcaggacgacggcgagaagctggtgcgcgatctgccgttcagctcgctaattttcgcccgacagatgtttgtggtcggcgaactgctgcgcgacctgccgccggaggatcgcataaccccgatcgtcggcatgctgcagggcgtggtggagaagggtggcgagctgcgtgtggaagtggcggataccaacgaaagcaaagagctgatgaagttctgccgcaagtttacggtgccgttacgcgcggcgctgcgcgaggcgggcgtgctgaccaactatgaaacgccaaagcgaccggtggtgcatgtgttctttatcgcccccggctgctgctataccggctactcatacagcaacaacaactcaccgttctatatgggcattccgcggctgaagtttccgtccgacgccccgagccgttccaccctcaagctggaagaggcgttccacgtttttattccggcggacgagtgggacgagcgtctggcgaacggcatgtatgccgtcgatctcggcgcctgcccgggcggctggacctatcagctggtgaagcgcaacatgtgggtctcttcggtcgataacggcccgatggcccagagcctgatggataccggccaggtgacctggctgcgcgaagacggtttccgctatcgtccgaaccgcaacaacatctcgtggatggtctgcgatatggtggagaaaccggcgaaggtggcggcgctgatggcgcagtggctggtcaacggctggtgccgggagaccatcttcaacctcaagctgccgaggaaaaagcgctatgaagaggtgtcgcagaatctggcctatattcaggcccagctggacgagcacggcgttaacgcccagatccaggcgcgtcagctgtatcacgatcgtgaagaggtgaccgttcacgtgcgccgcctgtgggccgccgtcggcggacgtcgcgacgagcgttaatccttccccctcaggccggagacgcgtgcgcgtcctccggccttccccttaaggctgcggcgcatccgacacaatatgcgtcacgtcatccagatgaccaatcctcgcctcgccggagcggttgaacttgcttttgtcgatcagcagcagcgactgcgccgcccgcttaagcaggatcgatttgaagtcggcattgaacgcattggagtcccacagcgcgccctgcgggtcgatgccttcgcaggaaaaaataaacagatcgatctccagcgatttcagctgggaaatcagcgccgggttcacgtagcagccatatttccgctgcagagtgccgccggagcaggtgagcgtgatctggtcgcgtttggccagctcctggcagatgggctggctgttggtaaagacgtgcagcgggcggtccggcagctggcgggcgagataccagcaggtggagctggcatcgagggcgatcaccatcccttcgtcaatccaggccagcgcttcgcgggcgatgtcggctttatgcgcgtaatggcttttcaggcgcatgtggaaaggatcgccgctgtcctggctgcgctggtggatcactttggcccggccgtggttacgcagcactttgccctgcgcctgcagctcgctcagatcgcggcgaatagtttccctgctgacgttgagctgttttgacaacgtttcggtggtcaggctgctgtgggtgatcaggagatcgacgatcgcctgctggcgggctgctttcatttattctcatcccatcattgattgagcgtctgcatcaggcagacgctccggcatgagattacggcgtgactcctttttttaaaaggatatttccgtacttagcgcactctcctgtgataacgatcgcaaaggctttttgcgcccggtcgtagaaggcaaagcggtcaatccgcacgatatccgggcagggggcctgcgccgatagcgcctgccgatagcgctgttccaccgtcgggtcgagcgcatcgccttcgacggcggccatcatcaccaccggcggcgcatagctgtctaattcgaacagcgggataatcgcctgcagcagatcgctgactcgcaggccatcggcgcggatcacctgcggccccatgctgtgcgccgggaaatgggcatcggaaaaaatgatttcatccccatggcccatttcggccagcactttcagcagttccggcgatatcagcggggaaatggttttgagcatctcaggcttcctctatcagttcaggttcagtttgcggccagaaatagcggtagcggtacgcgacctgcgctctggcctgttctggcgaagagaactcgcccacgccataccagccaaacatcgccgcgccggccacggtggtttcggcatcgtcgaggactttgatcggtatcccgagtcggttggccttgatctggttccatagcgcgttgcggctgccgccgcccaccagcagcagctctttcgccctgaagccgccgattttttccagggtttgcagatgctgcgccagctgatcgcttaacccctccagcgcggcgcggtaaaaatggccgcgggtggtgttgagcgtgacgccctgccagccggcgtgctggctggcgagcaggtcgcactgcatcctgacgccctgggcgccgggcgggatcgcctgcgcttcgtcaatcagcgtctgccatggggtgtcagcgctccacagcagtttgcgcacccactcgagcacgccggaggccagccactgcatccccgggttatagcggcccggctggctgtccagctcgcaggtggagccgctgtagtcacagagcagcgaggtgtcgacctgcgcgctgcgtaccatcaggatctcccaggtcccggaggaaagcaccggctcatcctgcccggcgccggcgccaaacagagcgaactgggtgtcatgcccggccgagataaccgggatcccgacggggaggcccagcagcgcagcggcctccggcagcagggcgccgatcggctggcctgcttcaaccagccgcgggaacaggcggcgcggcaggccggtcgcctgcaggatcggcgcgctgaaatcgcgctgccggagatcgagcatctggctggtgcctgccatggtgaggtcggtggtgaactccccggtcagccgatggttgatcagtgatgaaataaacagccaggcatgggcctgcgccagcagctgcgggtggttctctttcagccacaccagcttatacagggtattgaacgcaaacgcgccgacgccggctatctgctgcagctgacgcgcgggcatatactggctgatattctccatcaccgccgcggtgcgcgggcatttccagctgatgatcggatacagcagggcgccctgctcatccaccagcgcgccatcgacgccaaaggtcgtgacggtgatgccgcgcaccgtgcaggaggccagctggtcatggatctgccgacagcagtcggcaaagcgctgcataatggcctccagcgaccactggtgccagtcgcttttttccgccgcgatgtcgctggcgttcgccgttgcggcgcgggcgataattttcccttgtcgatccacggccatcgcccgcacgttcgtggcgccgcagtcgaggaccaggataacgtcttgcttcatagtgactcccgaaacaacattgccggatggcgcagcgcttatccggcctacagaccgcgcgcgtctgtaggccaggtaagcctgctcctccgggcgaaaccaacctgttaacgcttatacagcggcccgtagttctggcaggcgcggtagtcctggccctcgatatccatgccgtgcgcggcccaggcggaagggcggtagattttcgcctcttccacgttgtgcatgcagaccggaatgcgcagcatggcggcgagggtaatgaaatctgcgccaacgtggccgatggtcagcacgccgtggttggcgccccagttggccatcaccgagtacacatcgctgaacgggcccttgccggtcaggcgtggggcaaaccaggtggtgggccaggtggagttggtgcgggcgtcgagctggtcgtgcatcgctttgggcagcgccacgctccagccttcggcaatttgcagcaccggccccagacctttgatgatgttcacccgggtcatggtgaacggcacgccgccttcggtcaggaagcgggaagagaagccgccgccgcggaagtattcgtggatcgccgggcaccattcggtcgccgcgaggcaggcatccgcctcgttctgctcaatctcccagtgaggtttcatcgtcgggttgccctgcgcgtcgcgctgctggcaggagccgtccagcgccgcagagccggagttaatcaggtgaatgatgccgtgctccgcccgcccggtgagcggctgcccggtgacccgttcaacggcatccggcgaccagtaggtgcgtacgtcggcaaacacctgggcggtgccggtgagctgatggcccatcagcatggccacgccgttgaggctgtcgttttcggtagcgacgacaaacggttcgcgcaccccgttccagtcaaaagagctgttgagcagcgcttcggcggtatcgccattggggtattgatcggtccagtggcgctgaccctggaaaccggcggcgatggcgttgtagcccagcgactcctccaccagtcctttttctgcgagcttcgggttaccctgcatcatgtcgcggatgcacatcgccatcagcaggctctctttcagcaccgcgcggctctgcgtttcattgcgcttatactgctcagcgttctgatcttcgccgtagcggaagtgtttatccgcccacgccagcgccatctccagctcggtttcatcatagattttttgatcgattcgccggcgcagctccgtcatgtcgacagcctgcaccttcatgccgagccaggattcaaaaaagttgtggtcgacgatagatccggcgatgcccattgagacgccgcccagcgacagatagcttttccctttcatactggcgacagccaggccggcgcgagcgaagcgcaacagcttttcttcgacatccgctgggatcgacgtgtcatcggcatcctgcacgtcatgtccgtagatggagaacgccgggatccctttctggctatgggccgccagcgccgcggccagatagaccgcccccggacgctcggtgccgttaaagccccagatggccttcgggcgcagcggatccatgtcgatggtttcgctgccgtagcaccagcagggggtgacggtgatggtgacgccgacgttctggctgctgaatttctcttcacaggcggccgactcggccatgccggcgatgcaggtatcggcaatcacgcactccacccgggcgccgcaggcgtggcgcagtttctcgctgataagcgcggcggtggctttcgccatgttcatggtttgcgcttccagcgactcgcggacccccatgcgacgaccatcgattaccggacgaataccgatcttcggtaagctgatttttttcattacagatccctcaggttatgcggataacaggcttagttcgtcgccgcttgtgaacggaaacgggcaaaaataaagatgatggcgaagcacagcgccgggaccagttcggcggtcgggatattgccggcggcgtcgctgacaaagcccatcaccggggtaactatcccgccgccgataatggtcatgacgataaatgacgagccatatttggtgtcctggcccagatgcttaatccccagcgagaagatggtcgggtactgaatggacataaaggcgctgcacagggtcagggccagcagaccgacgtggccgccgctgaaggcggagagcaagcagagcagcatggcgataaacgcatagatagcgagcacgttgtgcggcgcgaagcggcggataagccaggtgccggtaaaacggccgataaagaagcagaccatggtggcggtcaggtagttggcggcgaaaccggccgtcatgcccgggatctcttcgatagcgtagcgaatcaggtagctccagcaggcggtttgcgcgccgacgtagcagaactgggccagtaccgcccagcgccagtggcggatgcgcatcaggcgcgtcagcgaagcgaaaaaagtgctctgcgcgctgtcgctgtggtcatcgctttgcagggaggggaagcgggtgcagacgatcagcagggcgaccagcaggacaatggccacgataatcatatagggggtttgtaccgacaggaccagactgtgcttccaggcgctgagctgttccggcgtcattttatccagcacctcctgcggctgatgcgggacgttagacaaaataagactctggccaaataccacggcaataatggcgccgaatgagttaaaggtctgggccagattaaggcggaagtgaccgccgctttccggaccgaggacggtgacaaacgggttggccgcggtttccagacagccaagcccggcagcgataataaataatccaatgagaaataaggtgtaattcatcacttcggcggcaggccagaacagcgcggcgccgcaggcatataaaaacagacccgtaaggatgccggctttgtagctgaattttttcatcaacatcccggcggggatgggaataataaaatagccaaagtaaaaggccgattgaattaatccggcctggaagttagtcagggtaaaggcctgttgaaattgcggtaataaaatatcattcagattattagccacggcccacagaaaaaagagggagcacagcagagcgaaaggaataatgtagctcttactctgcccgctctccatggcgcggtaactttgcgttggtatcgttgtgtttcccatagcgtcctcatcagttcagaagcatttacaacagcattcagggcgcagtctggtgctgcagcagaccgcaaaattaagtgagctcaggtgacgcgccggtgagtgaaatgaaagtcacggcggaactcatggcttcattttcaaataaaaaccgtctgttaatatgatgatggtcacacttaacgtactgtgggccattttatgtgattattgtcactttaatttttcaaaaacgctgaccgtttgagaaaataaattcacaaaaccacaacgctaatgaccgaatgaatatatatcgtggaaaacgggcaaatgttacaaagaaataaaatgcccgcttgatgaaatattattaagaacgggcattttaatctctctcgtaatgggcgtggttgctttattcatggcggaataattgacgcggctcacaaaaaataatcatgaaaattcccctttgaatattcaggttgatgatgaagatcattattcaccctatcccacggtagccgacgatatttctgttgccctgccgttgatggatgatgagtcaccaaaagaggaacgcaatggaaagaaacagactggcccggcagattatcgatacctgcctggaaatgacccgcctggggttaaatcaggggaccgccggcaatgtcagcgtgcgctatcagggaggaatgctgatcacccctaccggtatcccatatgaaaagctgacggaagacaagatcgtctttattgatgccgacggccagcatgagcagggaaaactgccctccagcgaatggcgttttcatcaggcggcctaccagacgcgacccgatgcccaggcggtggtccacaatcacgctgtccattgtacggcggtgtcgatcctcaaccggcccatcccggccattcactatatgatcgccgcggccggcgggaattcgatcccctgcgcgccctatgccaccttcggcacccgcgaactgtctgagcatgtcgcggtggcgctgaagcaccgcaaagccacgctgctgcagcatcacggcctgatcgcctgcgaggccagcctggagaaagcgctctggctggcgcatgaagtggaggtcctggcccagctctacctcagtacgctggcgattaccgacccggtcccggtgctggatgacgaggcgatcgccatcgtgctggagaagttcaaaacctacggattacgcattgaagagtgatgccgcaacgctaacaggagagccacgatggcaaacagaatgatcctcaatgaaacggcatggtttggccggggggcgataaacgcattaaccgatgaagcggtgcggcgcggctatcgtaaagcattgatcgtcaccgacagcactctcgcccgctgcggcgtggcggcgaaagtcaccgacaaactggatgccgccgggctggcatgggatatattcagcgacgtgatccctaacccgaccatcgccgtggtccagcaggggctgcaggcctttcaacgcagcggggcggattacctgatcgccatcggcggcggttcgccgcaggatacctgtaaggcgatcggtattattcagcgtaacccggaattcgccgatgtccgtagcctcgaggggctgtcgcccacccgtcagcccagcgtgccgatcttcgcggtgccgaccaccgcgggtaccgcggcggaggtgacgattaactatgtcatcaccgaggaagaacagcggcgcaaattcgtctgtgtcgacccgcacgatattccgcaggtggcctttatcgatgccgatatgatggacgctatgccgccggcgctgaaggcggctaccggcgtggacgccctgacgcatgctatcgaagggtacctcactcgcgccgcctgggctttgaccgatgctctgcacctcaaggccatcgggatcatcgccggcgcgctgcgcggctcggttgccggcgacgccggcgcgggggaagctatggcgctcggccagtatgtggcggggatgggattttccaacgtcgggcttggcctggtgcacggcatggcgcatccgctcggcgctttttacaacacgccgcacggcgtggcgaatgccatcctgctgccgcacgtgatgcgctttaatgctgaggcgaccggggaaaaatatcgcgacatcgcccgggcgatgggcgttagggtggaagcgttaagcctgaccgccgcgcgcgaggcggcagtagaggcggtctgccagcttaaccgcgatgtcggtattcccggccatctgcgtgaggtgggcgtcaggaaagaggatattccggcgctggcccaggcggcgctggcggatgtgtgtaccggcggcaacccgcgcgaggcgagcctggcggatatcgtcgggttatatcaggcggcctggtgattgcctggcccgggtaaagcaggcagttaccctgcaccggcgcacctcttaacgatggtcagcgcgtcagccgcagctgctgcagattgccgtccagctggaggtcggtctgcaggcgggccacctcccggcaggtgaaggccatctcctgatgcgcggccagctttttgcgccacttctccgggacctcggccagacgggcgtacagcccctccaggtcctgaaactcgttcagcagctgggcggcgcttttgggtccaatgcccgccacgcccggcaccttcgagctgctgatccccgccagcccccagtaatccgctagctgctccggggtgacgccgaactcgctggcgatgaagggcgcatccagccagcgcttctgaaagtagtcgcggatgcggatggtgggcgacagcagctgacagtagcctttgtcggtggagacgatggtggcctgatggcccgcctgggccaccttcaccgccagggtggcggcgagatcgtctgcttcgctgcccggcgaggcccagcagcggatcccccgctgttcgaaggcggtccgcagcgccggcatctcggccaccagcgtctccggcatcggcgcgcgtccggctttgtactccggcaggcgctggtgacgccaaccgtgggcgcgatcctcatcgtcgaacaccgccaccgcatgggtgggctgactgtggacgatcagctgctccagggcatgcaggcaggtatcgacgcagggtgaaccctgcaccgcgtgaatgcggcggattagatttaacgcgtcgacgattaacagatgaacagccacagatacccccccttattctcagcgtctttagggtaacatcgccatcagatcgaggctatctgcgcctgaacaatcaggaagataacgcgcaaatttcgctaactgaccgccatcagcggtctgatgacgtccggcgcgggttcgccgtaccacaccgcttcgcgcaccgggaccggtttggcgataagcccgagggcgtaaaagcgatcggcgatggtctgctgggcgcggatcaccgacagatccatcggccgcgggcgatggctgcggcgggcgagggccatgctcagcgaccgggcgtcgatccccagctctgccgagagtaagcgggccgcttcgccgcgatgcgagtcgataaactgcccggtgtgggtcagctccgtcagcaggcggcgcatgatatcgccatgctgagcgaggtagtcccgtcgcgaaagataaaactgatggttgttgacccggccttcgccgctggcgaccacccgcagctcgccggtgtgttcggcgtcgctgagcagcggatcccacatcatccaggcgtcaaccgccagatagtcgctggcggtcagcggatatttcggcggggtatagaccacccgcacatcgttcagacccaggccggcgtcctcgaggatctgcagcagcagccagtggacattcgaccctttattgagggcgatgcgtttaccgcgcagatcgctgagctggcgaatgtcgctctcctgcgggacgaccatcgccacgctgcgcggcgccggcggctcccacgccacgtacatcagttcgctattgctggcctgggcaaacaccggcggcgcttctccggtggtgccgaagtcgatctcgttgcaggcgagggcgtggaggagctgcggtccggcaggaaactcactccacagcacgttgacgccgaggctggcgaaggcggtttccaggctctgacgggctttcaggatcccgaggctgccgaagcgctggtagccaatgcgcagttcgcgatcggccccggctgcgttggcgaacgcccgcggcggcgcaggcgggcggcggcggcttttgatcagcccgaggttagcgagctgggtgcgcaaggtatgccggctgatccccaacagcgcggccgcctggctctggttatcgtcgcaatgcgccatggcgtggcgaatcagggcgctggtcactcgctgccacagcggctcgccgggaagcgccagctggtggcgaataaagtcgtccagttcatgatcgctcgccgcccccggggcgtcgttgagcgtcgccaggcgcagctgggcaggactgatctcctcttctttactgagcagcaccgcgttgtgcagggtgttttccagctcgcgaatattgcccggccacgaatagtccatcagccgggccagtgattccggcgccagacgcagggttggccgcccgaggcgccgggcgtagagtgataaaaagtggtgcgccagcagcgggatatcctgccgacgctggcgcagcggcggcagcggcaccaccgcgatattcagtcgatagtagagatcctcgcgaaagcggcgctcgcggatcgcctgggccaggtcaacgtgggtggcggcaatcacccggacattcactttaatcgctttgcgtgagccgacgcgggtaatttcacgctcctgcagcactcgcagcagcttgacctgcagcggcaggcttaattcgccgatctcgtccagcagcagcgtccccccttccgcggcttcaaaccagccgggctgtccctgctgcgcgccggtgaaggcgcctttctcatggccgaacagttcggcttcggcgaggctctcggtcagcgcgccgcagttaacggccagaaacggctgctggcgacgggcgctgtgatgatggagatagcgggccaccacctccttgccggtgccggtttcgcccacgatcagcacggtcgcctccgttggcgcgagtttgtccagcaggctctggaaggccttcgacgccgggtcgatcagcgcgggagcggtggaaggggattctgggttcagcatagagggcctccgatcgttgatgctctgaacttatcctgcggcggccgcagaaaccagagggggaaggcccgcggctgttgcaaatgcgccagcggatgcgcggcggctgcgcgatttgcaacagcgcggcgcggcgaagccgttttcagggcattgattttaaaagattaattttttattcaccattggcatgattatcgctaacactcatataaccaaattaaaacatctcttcaataaatatcggatatggttatataggaaatagataatgacgcagcaagctcccgacaagatcaatgtcttctggttcttacctacccatggcgatggccgttatctgggtaccaccgagggtggacgcccggtcgatttaccttatctgcagcaggtggcgctggcagccgacagcctgggctactacggcgtgctgatccccaccggtaaaagctgtgaagattcgtggctggtggcctcggcgctggcgccgttgacccgccgtctgcgctatctggtggcggtcaggccgggcctgcagccgccaaccctggcggcgcggatggcggccaccctcgaccgtttatcggaaggtcggctgctgatcaacgtcgttaccggcggcgacccggtggaaaacaaaggcgacggtatcttcctcagccacagcgagcgctatcatgtgacccgcgaatttcttgatgtttacacccgcctgctgcgcggggaaaaagtggattatcacggcgagcatattcacgtggaaggcgctgaggtgttgttcccgccggtgcaggagaatggcccgccgctctatttcggcggctcttctgatgcggccattgatgtggcggccgagcagatcgacagctatctgacgtggggcgaacccccggaactggtggcggagaagctggcggtggtgcgcgagcgcgccgcggcccgcggacgcatcctgcagtacggcattcgtctgcacgtcattgtgcgcgaaacggaagaagaggcatgggccgccgccgaccggctgatcgcccatcttgacgacgataccattgcccaggcgcaaaagatcttcgcccgcatggactcggccggccaggcgcggatgagcgccctgcatcagggatcgcgcgataatctgcgcattgcgcccaatctgtgggccggcgtcggactggtgcgcggcggcgcgggtaccgcgctggtaggtaatccgcagcaggtagcggaacgcatccgcgaatatcaggcgctcggcatcagcaactttatcttctccggttacccacatctggaagaagcgcaccgctttgctgagctggtgatgcctctgttgccgctggaaaacggggcctcgtcgaaggcgcgtagcgtgaacaccggtccgtttggcgaaaccatcggcggcgataagcgcccggtgcgccaggtcagcgccagctgatggcccggagcgcgaccatgagacagcataccggaggagggcagcgatgagtgcagaaccgcatatcgtgattatcggcggcggctttagcggcgcggcggtggcgattgagctgctgcgcctggcgccgaacggggtgcgcgtgacgctgctggagccgcgccagtcccccggggccggggtggcctactccactgcggagccgacgcaccggattaacgttccggccgctcgcatgcagctggccggcgacgaagagggcgccttcgatcattggtaccgccatcagcctgcctttaccgtcgatgtgcaggcgctgcgcccggacggttccgtctaccctcagcgcggccagtttggtcgctatgtggcgcagcgttttgccgacgccgcggcgtccagcggcggacggcttcgccacctgcgcgatcgggcgctcgcttttcatcaggggacggtgaccaccgacggcggcctgcagcttaaggccgatctgctggtgctggcgatcagtcatccaccgccttcgctgccggcacaggccgaagcctggcgtcatcatccggcgctgattgccaacccgtggcagccaggcgcgctcgatgccatcgccccacacgcccgggtggcggtgatgggcaccggattaaccatggccgatacggtcgcgacgctggaccggctgggccaccgcggcagtatcgtcgccttttcgcgccatggcctgctgtcgcgcggcaaccttagcggcgcaggggcaacctggcctggcgactatcagcagggcagcctgcgccagcgcctgcgccagatccgcctcgacgtcgcgtatgcggcgcagcagggcctgagctggcaggtggtgctggatgcggttcgtcagcaggggcaacggatctggcaggcgctcagcgtcgccgatcgccagcgttttctgcgccatctgcgccattactgggatgtccaccgctaccgcgtggcgccgcaggtcgccgaggtgctggaggcgcgccagcgcacgggcagtctgcaggtgcaggcggccaggctactgtcgataagcggtgaaggcgaaacgctgcgtctgacgctggcgcggcgcggcggcggcgtgcagacgctgagcgtcgatcacctgatcctgaccaccggacccgcacaccgcgccctgaccgacagccagccatttttacaggacctcgcccgccgcggcctgattcgcgccgatgccctcggcatgggcctggaggtggacagccgttcccgggcagtggctgagccgcacgttgaggcgctgccggtgctggtggccggtccggccgcccgcgggcgttttggcgaactgatgggcctgccgcaggtagccgaccatgccgctgacgtggcggcgcaagcgttactcacgctcgggatcccgcaggactcccgatgtcctgcgtactgaatacctctctttcttttccctgattcattttgccgcgtgcgccccggcgacgggccgcgctatggagattgctatgtcatcacaacgtgaaattcgtcttaacgctttcgatatgaactgcgtcggccatcagtcgccgggcctgtgggcgcatccccgggatcgctcctggcagtataaagatctggagtactgggtggatctggcgcggctgctggagcgcggcaagttcgacgggctgtttatcgccgacgtgctggggatctatgacgtgctgaacggcagcggcgatgcggcgatccgccaggcgacgcaggttccggtcaacgatccgctggctctgatcaccccaatggcgctggtgacggagcatctgggcttcgggctgaccgcctcgctgtcgtttgagcatccttaccccttcgctcgtcgtctgtcgacgctcgatcatctgaccaaagggcgggtgggctggaatatcgtcacctcctatctggagagcggggcgcgcaatatcggccagcagacccagaccgaccatgacacccgctatgactatgccgatgagtatttgcaggtgatctataagttgctggagggaagctgggaggatggggcggtgctgcgcgacagagagcggaagatcttcagcgatccgcggaaaatccatcccattaaccatcagggacagttcttttccgtgccggggatccacctctgcgagccatccccgcagcgcacgccggtgctgtatcaggcgggggcgtccagccgcggcaaacagttcgccgccggccatgccgaatgcgtcttcgtcgcagcgccgtcgaaggtgctgctgaagaagacggtggcggatattcgccgccgggcagctgaggcggggcgcgatccgcacagcatcctgatcttcaacctgcagacggtaattgtcggcgacaccgaccgcgaggcacaggcgaagtggcaggaatataagcagtacgtcagctatgaaggcgcgctggcgctgctctccggctggacggggatcgatttcggccagtatcagccggatcaggtgctgaagtatctgcacaccaacgccattcagtcggcggtggaggccttttcgaccgctgatccgaaccgccagtggacggtgcaggccctggccgattgggcggggatcggcggcttcggtccgctggtggttggcagcgcgcaaaccgtggcggacgagctgcagtcctgggtcgaagagacggacgtcgatggctttaacctcgcctatgccgtcactcacgaaaccttccgcgatgtcgtcgagctgctggtgcctgagctgcaaaagcgcggcgtctttaagcaagagtaccgcgaggggaccctgcgcgaaaaactgttcggcggcggcccgcgtctggccgcgcctcacccgggcgccagctaccgccgcgatgcgcgcacggcggcatcggtagaggagaaggtgacatgatcgctattgatgacctgtataaaagttaccgcacggcggatggccggctcagcgcggtgctgaaagggctgtcgctgcaggtgcctgagcgctccatcaccgcggtggtggggccgagcggcgccggtaaatcaaccctggcgcgctgcatcagcctgctggagcaaccggacagcggcagcattcgtatcaatggccaggatctgtcagcgctgtccggcgaggcgctgcgccgggaacggcgggcgattggcaccgttttccagtcttcggcgctgttgagccgcaggaccgcctgggagaatgtcgccctgccgctggcgtggcttggtgtggtggagcgcgatatcaaggcgcgggttggcgagctgctggagagcgtcggcctgagccacaaagcggatgcctggccggcccagctctcaggcggccagcgccagcggatcggcattgcccgcgcgctggcgctgcgcccgtccgttctgctggcggatgaagccacctccggcctcgatcctcaggccacggcctcggtgctggctctgctcaagcggctgcgtgatgagtaccagctggcgatcgtcctgattacccatgaaatggacgcggtgcgcacggcggcggatgcggtggcggagatccgcgacgggacgatcgtccagtacgggcggatcgaagatctgctggcgcgtcccgattctctgctcggccagcagctgttgccgctgacgccggcggcagctacccacagcgatctgctgctgcgtctgagctaccgctgggatgtgccggtggccaccgactggatcagccgcctgagccagcagtgggcgctgcagatcgatctccttggcggtcacgtcgaggtgattaatggtcggctggccggtcgcctgcaggccggagtgcgctttcagggcgaacgcctgtcgcccgcgcgactgcagggcctgctggcgcagctcggcataacggcggagatcctcgacagcgcgccgttgctcagggaggcggtatgaaaccgacagtcatcagtcaggataccccctggggcgaaatcccttcgctgctgctccccgcctatggcgaaacctggctgatggtggccattgtgatgctgtttgtcgtcacgctgggagggctggtgggggtggtgttgtttaatgcctcgccgcggggcttatttccgcacgcactgctgtaccggctgctgaactgggtggtcaatatgggacgttcgctgccgtttctggtgctgatggccgccattatcccgttcacttactggctgaccggcaccacgattggcatacccgccgcggtagtgccgatgatcgccgccggcgtcccgttctttggccgtctggtggagaacgcgctgcgcgagttgccggcggaggtcaccgcggtgggggtcgtctgcggcgggtcgcgctggcaaatcattgccagcgcgcagctcagtgaagccatgcccgcgctggtagcggcggtgacgctaaacctggtctcgatgatcgagtattcggctatcgccgggaccatcggcgccggcggcatcggctacctggccgtggtgtacggctatcagcgcttcgacaaccacatcatgatcgcgacgatcgttgccctgatcgccacgatccagttgattcaatttttgggtgaccgtctggtcaaccgtttacgccacacgcaggggaaccttgtatgacaacagagcaatttgagttacgtaaagcgcggcgctggccctggctggcggcgctggcggtgattatcctgctcgccatcgccttctggtggtggcggggacatacccaaagccagcaggtggtcttcggcagcacgttaaaaattcactacgagccggcgatggccggcgagcagcggatcattgagtatattaatcagcatattgcgcccgattacggtctgaaactggaggcggtgggggtgcaggatccggtccaggctgaccgcgcggtagcggaaggtcagtatgccgggacgatctatcagcatcagtggtggcttaaacaggtggtggacgctaacggctttgcgctgtcgaccacggtgccggtgttccagtgggcgtttggcatctattccgaccgctactcgtcggtacaggcgttgcccaacggcgcgaccattgtcgtgcctgacgatggcgccaatcaggggcaggccctgtggctgctccagcgcattgggttgatctcgctcgacccggcggtggagccgcgcacggcgaagctgaaaaatattgtcggtaacccgcatcagtttgtctttaaagagctggatctgctgaccatgccgcgggcgttaaattcggtggatgccgccatcggctatgtctcgcaatttgacgccgggaaagtgccgcgtgagaaaggcatattattcccgccggcgccgcgcacctttgcttcgcaattagtgattggtacaccgtatttatcgcaggaaaatatcgtcaaattaaaacaggctttttctgatccgcggatccagacgtggttaaaaaccaccgatgacccgctggtaaaagacgtattagttccagtgtccgcggaataagcgtcctgcacgacgtctattttcgttgttatttatttcacttgaggatgcgtgaaagcgcgtcctttttgtgctggtgatatttattaacttattgattatattgatttttatagaatgatttgttgtttttattctcgtcgcgcgcggtctataaccgctgatgacctgcacaaaataataaggtgaaaaaatgagtacattaccagtggataatcccggtatcgcttcggtaccggtcagtagcgtcggggatgtggcgcggctaattaattccggcaaggaacaagcgaaatatgcgcggatgattgtcttcctcgcgctggggggcgtttttctcgacgcatatgacttaaccacgctctcctacggtattgatgacgttgtacgtgaatttcagctctcaccgctgctgaccggcctggtgacttcgtccattatggtcgggactatcgtcggcaatattatcggcggctggctgaccgataaatatggtcgctattcggtttttatggccgatatgttctttttcgtgatttcggctatcgccgccgggctggcgccgaacgtctgggtgttgattggcgcccgcttcctgatgggcatcggcgttggcatcgacctgccggtagcgatgtcctatctggccgagttttcccgctttgccggcaaaggcaacaaagcggctcgcctcgcggcgtggtgcccgatgtggtacgccgcctcaaccgtctgctttctcattatcttcggcctctatttcctgctgccgcaggagcatcttgactggctgtggcgcgcctccctgctgttcggcgccgtgccggcactgctgattattgccgtccgcagtcgatttatgaatgaatccccgctgtgggcggccaaccagggcgatctgacctctgcagtgcgtattttacgcgactcctgggggatccatgcccatgaggtcccggcggcgaagcccgcgccagcgccgaaagtgagcttccgcgtgctgttcgaaaaaccctaccgcgagcggactatcgtcgccggggtgatgaatatctgtatctccttcgagtacacggcgattgcctttttcctgccgtcaattcttgcccagttcctcggggctggcgtcttcgaaactatttcggcatcgctggggctgaacgccctgtttgcttttaccggtgggctgcgcggtatgcatctggcgtggaaatatccttcgcgtcatgtggcgatagccggcttcgccctgcagtttgtggcgctgattgtgctggcgctggtggggcaaccgcacgcgacggcaggtatcgtgctggctatcgcgatgctggggctgtggctgttcgccgaagggtttggcccgggggcgcagctgatgatctacccggcgctctcctatcctactgccattcgcgccaccggggtcggtttcagccgggcactctccgggatcggcagcgcgctggcgttgtttattctgccgctgctgcaggcctccctcggcacgcagatgttctgggtggtctcgcttgccgccattattcccattttcttcctgctggcggtccgtcatgaaccgacgcgagaagatatcgacgcacttcatgaataaggaactgacaatgaccctgctctccactggcaccgattatgacgcgctggcggccgccttccgcccgatattcacccgtatcgcccagggcgctgcggagcgcgaacagcagcgcattctgcccgatgagccgatccgctggctgaaagaagcgggcttcggcacgctgcgtatcccgcgcgagaagggcggctggggcgcttcgctgccgcagctcagcgcgctgctgatcgagctggcgcaagcggactctaacctgccgcaggccctgcgcgcgcactttgcctttgtggaagatcagctgaatcagccggattccgccgggcgcgaccgctggtttcgtcgcttcctcgacggtgagctggtgggcagcggctggacggagatcggcgcggttaagctgggagaggtgaacaccagagtgacgccggcagagggcggctggcgactcgacggcgagaagttttacagcaccggcgcgctgtacgccgactggatcgatgtgtttgcccggcgcagtgataccgccagcgatgtgatagccctggtcagcacccagcagaccggcgtggtgcgggaagatgactgggatggctttggccagcggttgaccggcagcgggaccacccgctttaccggcgctcgggtggaaaccgaacatgtctatgattttgcccagcgctttcgctatcagaccgccttctaccagcatgtgctgctggcgaccctcgcgggcattggcctggcggttgagcgggatgccgcgcagggcgtcaaacatcgctcccggatgtacagccacggcaacgccgccgtgccgcgcgatgacgcccaggttctgcaggtcgttgggcagatcagcagctgggcatgggcgacccgggccgcggtcctgcaggccgcggaatcgctgcagcaggcctatgtggcgcacgtcagcgacgacgaagcattgattgcccggcgtaaccagctggcggaagtggaagcggcgcaggcgcaggtgatcgccagcgactggatcccgcgggcggcgacggagctgtttaatgccctcggggcgtcggatacgcgaactcgccttgcgctggatcgccactggcgcaatgcgcggacggttgcctcgcataatccggtgatttataaggcacgtaatatcggtaactggctggtgaacggtgaagcgcccacctttatctggcagataggcaatggtgagaaaacggcggggtaagcctgtcggcgacgggaggcgcagagcttcccgtcgtcaggaaaatcaaggtttatccagcgaccaggtggcgctgcgcacgtcgactttcaccggcagcaggccgatgcgcgtaaaggtatccgccagcgcctgctgttcgttatacaccgccggggtcatgcgttcggcaccgtagggcaggcgggccagggtcttcagccagatggctttatccagtccggttgaggtcgacagcagcccggcggcctcgtcctgatggctgttcgcccacgcgctgagtttacccagctcatccaccacctgctttgctgtctccgggtaggtatctgcaaacttgcggctggcgagatagaaggtgtagtgcggcaccagcccctcggcattgcggatctgtcgggctttcgcgttggtttccacttctgcgaggaacggatcccagatcacccacgcatcaatcgccccgcgctggaaagcggcgcgggcgtccgccggcggcagatagaccggggtgatgtctttatagctgaggcccgctttttccagtgcggcaaccagcaggtagttgacgtcagaccccttgttcaaccccacgcgcttgcccttcaggtcggccacgctgtggattgccgactgttcaggcaccacaatcgcttccgttttcgggttagcgggggagtgggcaaggtagaccagatcggcttgcgccgcctgggcaaaggccggaggcgcatcgccggtcgcggccagatcgatactaccgacgttcagcccctccagcatttgcggcccggcggggaattcgacccagcgtacggcaatgccctgttttttcaggctctcatccagcgtgccgcggtacttcagcagcgcgaagatattcgccttttgatagccgatgttgacggtttccggcgctttggccagcgcggaggtagagagggcggcgaggaccagcagccaggcggggcggaatcggttggacattgtctgttctccttagcggttttgcgtaaggtaacaaacagcgcttataaccattaaataactaaaattttattgatataacaaaaagagttatgcaggacgatggcccgacacgccgatgcgtggcgggccagcaggttaatcgcaggcaacaatcttcatcgccagaccaccgcgggaggtttcccggtacttggcgttcatgtctttgccggtttcgtacatggtctcgatcactttatcgagacacacgcgcggctcgctggtccggcgcagcgccattcgcgcggcgttgaccgctttcacggcagcgatagcgttgcgttcgatgcacggcacctgcacctggccggcgaccgggtcgcaggtcaggccgaggttatgctccatagcgatctctgccgcgatgcacacctgacccgggctgccgcccagcagttccgccagaccggccgccgccattgagcaggcgacccccacttcaccctggcagccgacttcggcgccggagatggaggcgttcatcttatacagcgaaccaatcgcgctggcgaccagcatatagcgggccagggagttgctgttcaccttgcggataaacttgtcgtagtaggccagcaccgccggcacgataccgcaggcgccgttggttggcgcggtcaccacccggccgccggcggcgttctcttcgttcaccgccagggcgaacatattgatccagtcgaccaccgccatcggatcgctgttggtggtgtcctggctcaccagcatacggcgcagcgcggcggcgcggcgcgggacgcgcagtttgcccggcaggacgccttcggtggtgatgccgcgctcgataccggcgctcatcacttcccacaccgcggcgaagtgttgctcaagggcttctttgctgtgcagcgccagttcgttctgcatcatcaggccggagagcgacagcccggtttcacggcagtgacgctgcaggtcggcggcgtttttgtaagggtaaggaacggcaaccggcgcctcggtagtctggccgaagtgctcctcatcaacgataaagccgccgccgatagagtaatacgtctggctgtagagcaccttgtcgccggccagggcggtgatacgcatgccgttctcatgcagcgacaggttgtcggcatggaaattcatgcactgatccaccgggaagtccacttcgtgcttaccgttggccagcatcaggcggccatgggtattaacatcctgaataaagcccggaatggcgtcgatgtcaacggtgtccggcaggttgccggcgagtcccatgataatcgcgatatcggtatggtggcctttaccggtcagggagagggagccgtagacgtcgacgacgactttgctcacctcggccagcaggccgcgcgcgatcaggtcgtcagtgaattgtttgcccgctttcatcggtccaacggtatgggagctggaagggccaatgccgattttaaagatatcgaatacgctgatcatatgtattcccgtgctgtcggaaagcgcgccgccgtaaagcggcgcggggggaggcgttgaatgaattagctgaacagagagtagaagatcgcggagatggcaatcaggcccataatcaccacgaagacgttgctgatatggccgctgtatttacgcatcgccgggactttctgaatcgcgtacatcggcatcaggaacaggatcatcgcgataatcgggccgccaagggtctcgatcataccgaggatgctcgggttcagggttgccacaatccaggtggtgatcagcatgaacagcgcggtcagcttgttcagtttgttgatttcaatcgatttgcctttactgcgcagggatttaatcaccatgccgttaaagccttcgcgagcgcccagatagtggccaaggaaggatttggtgatggcgatcatcgcgatgatcggtgccatccaggcaatgattggcgcgttaaagtggttcgccaggtaagacagaatcgagatgttctgctctttcgccgccgccaggtctgccggagagaggctcagaacgcagctgaagacgaagaacatcacggtcagcaccatcatgatgtgggcgcgcgcgaggatactggagcatttcttctcagcgccttcgccgtactcttcacgtttggctaccgcgaaggaagagatgatcggcgagtggttgaaggagaagaccatcaccgggatcgccagccacagggtcatcagcaggccgttgccggtaacggaagcgccgctcagggagagcgtctctagcgccgcgccgttccactgcgggatcagatacagagccagcaccatcagcgcgataacgaatgggaacaccagcacactcattgccttaacgatcatctgctcgccgaaacgcacaatggtcatcatgccgacaatcaggatcagcgacagaatggcgcgcggcggcggcgtcatatgcagctgatgcgccatgaaggtttcgacggtgttagtgatcgccacgctgtaaaccagcaggatcgggtagatagcgaagaaataaagcagggtaatcagcttacctgcgcctacgccgaagtgttcttccactacttcggtgatgtcttcgcccgggtttttcccggagagcacgaagcgggtcatgccgcggtgggcgaagaaagtcatcgggaaggccagaatcgccatgatgatcagggggatcatgccgccaacgccggcgttgatcggcaggaacaagacgcccgcgccaatcgctgtaccgtacaggcccagcatccacatggtgtcggttttacgccatccgctgcgggtttcgcccgaaacgatggtgctggtttgagtggtttccatctgtatctcctggaggaatcaacaaaatctaatgaataaatacaattgcgtaacatgaaattcgtttaattacggtttttttagaaattttctccgtaataattgggccggaaagatacatttatatggtttatgcatcagtgatcgcgatctcaaatgcaataatccactttcaatgtgcgtatttttagtccaacagcctgtttctggtgatcagccagcgatttgtggcgcgaaggctaccatttgcagcatatgagataaaagcggagcggcgtaataacgagggatttactgtaaaaaagagaactagtcgacgtttttgcgcttaaaaccattttttgcagtgataattgtcgcagtttttaccaacgcaaacgtttggctatgtagaaataattcaggtgattgattagtaacagaaaggtttttagcgcgttctggaagtcagaggaagagagcccgccgggggcaggcgtcaggcgatgccccggcgggagagtgggaaatcaggcgatgatttcgtagcaaggaatataggcggtgccgcccggaagcttcatgcggtgctgggcgacgaagccctgcagcagatcgtccatacggcgcatcatctccggatcgccgtgcagtttgtaaggaccgtactgctcaatggcctggatgcccacctctttgacgttccccgcgacaatcccggagaaggcacgacgcaggtcggcggccagcacttccaccggctgatccggggagagtttgaggttggccatgttctcgtgggtcggatcaaacggcatctgcaggtccggcgagatgcgaatcgaccagttaaagctataggcgtcatcggtctcgcgacggctctctttcaccagcggcatcgcttttttcatctgccgcgccacttccgcggggtcgtcaatgatgatccggtagtggcgacgggccgattcgcccagggtatgggtgataaactcgtccagtacgcggaagtagtcggcgctctccttcggcccggtgaggatcagcggcagcacctgcgctttgttgtcggggtgcatcagaatacccagcaggtagagcagctcttcggcagtgccgacgccgcccgggaaaataatgatcccgtgggcgatacgtacgaaggcctccagacgcttttcgatatccggcatgatgatcagttcattgaccagcgggttcggtggttccgcagcgataatggatggttcggtcatgccgataaagcggctgtctttgtagcgctgctgcgcatggccgacggcggcgcctttcatcggcgcctccattgcgccaggcccgcagccggtgcagatattcagttcccgcaggcccagctgcgtaccgacgcggcgggcgtagagatattcgttttcgttgatggagtggccgccccagcagacgatcatgttcggcgcctcgccgacgtgcagcgcgcgggcgttgcgcaggatcgagaacaccaggttagtgatatgaaccgaactttcgagatcgaggttcgggaagcgaacggtattgtggatctggccgtaaacgaacaggatatcgcgcagcacggcgaacaggttggcctgcagggagcggataatccgcccgtcaacgaaggcgtcttccggcgggttgatcagttccagcttcacgccgcgttcgcgccgcagcacgttaatctcgaaattttcgaaacgggacaggagctccttgctgttatcggtcaggctccccgaattgagcacagcaagcgagcagttgcgaaagagttggtacaggtcgctgctggcggtgcgcttaagcatatccacttccagctgcgacagcatatccattgaaccaagcgggctaacatgtgtaatcaagtgaactccttacaggacgcttatggtcttcctgtgattacaatagccctgcgaacggcgtttccacaaccttgcgcgcgcctaaacgcacgcaaattgtgaaattgtttattattgacgggcgaggcggccggtggcgggggaaaagtcgccattgctgcgccaggggttgatatccagaccgccgcgtcgcgtatagcgggcgtaaacggaaagcgattccggctggcagaaacggagaatatcgttaaagatacgttcgacgcactgctcatggaattcgttatggtggcggaacgaaaccagatagcgcaggagctgctcgcggtcgattttcgccccccgatactggatctgcaccgagccccagtccggctgatgagtgataaggcaattagacttcagcaggtggctgaccagcgtctcctccacgattttgccgctggcggcgccctgcaggtaatcggcgctgaactgatagttatcgatctcgatatcctgatcgtcgatgcaggtgccgtgcaggcgggcaatcggctggccttccagttcatccaggcggtagagcgataccttcaccttcccctgcgcgcaggcgctgagatcgcgagtcagcgtctctgcaacgtcctgccagctagcgaaacgggtctggttaaagctgttgagatagagcttaaagcttttcgactccaccagattgaggctggtatcgggcagctcgacgtggccgacagctacctgcggcagacctttgccgttcagccaggagagttcgtacagcgtccagatatcggcgccgtgaaacggcagattatcggcatgcaggcccagcgggtcgcggtttaaactgcgcggcacgccctgcagcagcgaggcgtcataggtatcgcggtaatcggttgatttaccgagcgtcaggccggccagcgcctgatgattatcgtaagaagacatgtttcaccatagtaaagcgggtacactattgctccagtgtatcctgtctaacgtgaagagagaaaccggtggaccatcagacagcagaagcgctacgcgcttttacccaacgatattgcgccgtctggcagcagcagcgccacagcctgccgcgcagtgaagagctttacggcgtcccgtcgccttgcgttgtcgacacccagggcgaggccgttttctggcagccgcagccgttttcgctggcgcaaaatatcagcgcggttgaacgcgccctcgacattgtggtacaacagccgcttcattcttattataccactcagtttgccggcgatatgtccggccggtttgccggcgaaaccttgacgctgctgcagacctggagtgaagaggatttccagcgggtgcaggaaaatttaatcgggcacctggtggtgcagaagcggttgaagctgtcgccgacgctgttcatcgccaccctcgagagtgaactggatgtgatatccgtctgtaatctcagcggcgaggtagtcaaagagaccctcggcaccgccaaacgcattacgctttctccctcacttgcgggtttcctcaaccaccttgagccagttctgtaatccagtctgccagatcgtttgtgagagatctcttacaaaacctgtaagagatcgtcatcatttaaggtaaatttaatccatacttttttatataagttgttggtattaaatcagatcttaattttttcgtccttttgagtggggactaatcttaagagattgtctcaagaagggttgtaagaaggggcagaatcagtgatcctatgtctgtcgacaggacgtcgcgaaatgaagcgaacatcaggatgatggcgcttctgcaggacccgccaggacggcgttgcagggacaggcttcaggatgaagcaaggataacgcaggatcgcgtaatggacacctccaggatggagaacgagagccgctcaggatgaacggtggatcaggaagatcgggacaaacttatggataagtcatttcgcatcggggtggtgtgaaagcaggatgcacgtgtttatggatgaacatggtcaggagacctcaggaaaagttttcaaggacgagcagggagcaccaatgtagcgggactgctgcaaaacgaaccgggagcactgtttatacagtgctccctttttttatttctcctgcggatttgctatcctgcgcccggtttttaactcatcgaggtttccccatgactcttcacgatagcgtgcgcgatcgcctgcgcgccattgaagccctgctgcgcgaaacggagcactggcaggagacggcgccggacagcagcgccttcgccagcgataagccgttttgcctggataccctggagccgctggagtggctgcagtgggtcctgatcccgcgtatgcaccagctgctggagagcggccagccgctgccgcaaaattttgccgttgcgccttattacgagatggctctggatcaggcccacccggtccgcgaatccatgctggcggaacttctgctgttagacgcgctgtttgccggtgagcaggcctgatgctggagattatctaccaggacgactggctggtggcggtcaacaaaccctcgggctggctggtgcatcgcagctggctcgatcgcgacgagaaagttgtggtgatgcagaccgtgcgcgaccagatcggtcagcacgtttttaccgctcatcgtctcgaccggcccacctccggcgtgctgctgatgggattgtcgagcgaggcgggccggctgctggcgcaacagttcgagcagcaccagatccggaagcgctaccatgcgatcgtccgcggctggctgatggaagaggcgctgctggattacccgctggtggaggagctggatagaatcgccgataagttcgcccgcgaagataaagggccgcagccagcggtaacccactaccgcggtctggcgacagtggagatgccagtggcgactgggcgctatcccacctcgcgctatgggctggtggaactggagccgaaaaccggccgcaagcaccagctgcgccgtcatctggcccacctccgtcatccgatcctcggcgacagcaagcacggcgatctgcggcaaaaccgcagtgccgcggaacatttcggctgccaccgcttgatgctgcacgccagcgagctgtcgttaacccatccttttaccggcgagccgctgaccctgcgcgccggttttgacgacgtctggatgcgcgcgctgtcgcagtttggctggcgcgggcttctcccgctaaatgaaagggttgagtttgccgacgacagcggtcaggatgaagagaataaggtcaatccagggagataatagcatggcggaagtcggaatttttgtcggcaccatgtacggcaactcgctgctggtcgcggaagaagcggaagcgatcctcagcggactgggacacaaggctaccgtgtatgaggatccgcaggtcaacgactgggaatcctacacgggtaagtatgtgctggtggtcacctccaccaccgggcagggcgatctgccggacagcatcgtcccgctgtatgagggcatcaaagatatgtatcagcctcacctgcggtacggcattatcgcgctcggcgacagcacctatgccaacttttgcggcggcggcctgaagttcgatcagctgctgcaggagcagggcgcgaagcgcatcggcgagatgctgaagattgacgccagcgaagacccggagccggagagcgtctccaatccgtgggttgagcagtgggccaccctgctcgcataaaagcgctgccctctccctacgcagagggcgctctttcaatacgtcgcggccagatacgcggacgtcaaaatagtagcgctttccaggcgccacgcctttaggcaaacgccacaatatccttaacaatatcatggcttaagccagccagtttcaccgggtcaagtgaggtatttcacactccggccctttttgctgcgctatgcggcgccagcggcgctggcttttcatttccgtgaacttccccccattctttcaggcattcgccacaaaccacctgcaatagcggcgtaaaagctgtgtggatgcacggtgagccgcggtgtgcctcttcatatactgctccagccagtgataaatgcagtgccagatataacgacaactatcaaaacacgaccacgtcattctgattaccctacaggttgtgctgttcagaatgaacgtagctaaacgctatgattcaggagtacaacaatgagttcattaagtcaggcggcgacggcggctgaaaagcgcaccaacgcccgctactggatagtggtgatgctgtttatcgtcacctcttttaactatggcgaccgggcgacgctgtcgatcgccggttcggaaatggccagggacatcggccttgatccggtggggatggggtatgtgttctccgccttctcatgggcttatgtcatcggccagatcccgggcggctggctgctcgaccgcttcggctcgaagcgcgtctatttctggtcgatcttcatctggtcgatgtttaccctgctgcagggcttcgtcgatatcttcagcggctttggcattatcgttgcgctgtttaccctgcgcttcctcgtcggccttgccgagtcgccgtcattccccggcaacagccggatcgtcgccgcctggttcccggcgcaggagagggggacagcggtatcgatttttaactccgcccagtactttgccaccgttattttcgcgccgatcatgggctggctgacgcatgaggtgggttggtcgcatgtgttcttctttatgggcgggctggggattgtgatcagctttgtgtggctgaaagtgatccacgatccgaacaaccacccgggcgtgaaccagaaagagctggactatatcgccgaaggcggggcgctgatcaacatggatcagaagagcagcgcgcagaaagtgccgtttagcgtcaaaatggggcagatcaagcaactgatcggctcgcggatgatgatcggcatctatatcggtcagtactgcatcaacgccttaacctacttctttatcacctggttcccggtttatctggtgcaggcgcgcggcatgtcgatcctcaaagccggctttgtcgcctcgattccggcggtgtgcggctttgtcggcggggtgctgggcggggtgatctccgactggttaatgcgccgcaccggctcgctgaacattgcgcgcaaaacgccgattgtgctggggatgctgctctccatgaccatgctgatgtgtaactatgtcaacgtggagtggatggtgatcggctttatggcaatggccttcttcggcaaagggatcggcgccctcggctgggcggtgatggcggataccgcgccgaaagagattagtggtctctccggcggtctgttcaatatgttcggcaatatctccggcatcgtcaccccgatcgccatcggctatatcgtcggcaccaccggctcgttcaacggcgcgctgatctacgtcggtatccatgccctggtggcggtgctgagctatctggtgctggtgggcgatatcaaacgtatcgaactgaaacctgtagcgggacgttaatcatgactactcaatccagcccgattatcacagagatgaaggtcattccggtggccgggcacgacagcatgctgctgaacatcggcggagcgcataacgcctggtttacccgcaatatcgtggtgttaaccgataacgccggccataccggcgtcggcgaagcgcccggcggagaggtcatctaccagacgctgctggcggcgatcccgcaggtggtgggccaggaggtcgcccgactcaatcgcgtggtgcagcaggtgcacaaaggcaatcaggcggcggatttcgacaccttcggcaaaggggcgtggaccttcgaactgaaggttaacgcggtggcggcgctggaagcggcgctgctggacctgctcggccaggtgcttaatgtgccggtctgcgagctgctgggcccgggtaagcagcgtgatgccgtcaccgtgctgggctacctgttctatatcggcgatcggcagaaaaccgaccttggttatctggaccatacgccgggcgatcacgaatggtaccgcctgcgccaccagcaggcgttgagcagcgaggcggtaatgcgtctggcggaagccgcccaggatcgctacggtttcaaagactttaagctcaaaggcggcgtgctgcccggcgagcaggagattgacaccgcgcgggcgctgaaaaagcgtttcccggatgcgcgcatcaccgtcgaccctaacggcgcctggctgctggatgaggccatcgcgctgtgtaaagggctgcaggatgttctgacctacgccgaagatccgtgcggcgccgagcagggtttctccggccgggaggtgatggccgagttccgccgcgccaccgggctgccggtcgccaccaatatgatagccactaactggcgcgaaatgggccatgcggtgatgctcaacgccgtcgatatcccgctggcggacccgcacttctggacgctctccggcgcggtgcgggtggcgcagctgtgcgacgactgggggctcacctggggctgccattccaacaaccactttgatatttccctggcgatgtttacccacgtcggcgccgccgcgccgggcaaccccaccgccatcgatacccactggatctggcaggagggcgacgcgcgcctgaccaaaaatccgctgcagattattaacggcagcattgccgtgccagacgcgccgggactcggcgtggaacttgactgggagcaggtgcgcagagcccatgaggcctataaagcgctgccgggcggcgcgcgcaacgacgcaggcccgatgcagtacctgatccccggctggacattcgaccgcaaacgtcccgttttcggccgccactaattaaaaaggatgatgctatgacgactttctcttcaacgcccgttgtcaccaccatgcaggtgatcccggttgccggccatgacagcatgctgatgaacctgagcggcgcccacgccccgtacttcacccgcaatatcgtaattatcaaagataacgccggccataccggcgtcggtgaaatcccgggcggtgaaaagattcgccagaccctggaggatgccattccgctggtggtgggcaaaacgctgggcgagtataaaaacgtgctgggcgcggtgcgcaatcagtttgccgaccgcgacgccgggggccgcggcctgcagacctttgacctgcgcaccaccattcacgtggtgaccggcatcgaagcggcactgctggatctgctgggccagcaccttggggtcaacgtcgcctcgctgctaggcgatggccagcagcgcagcgaagtcgaaatgctgggctatctgttctttgtcggtaatcgccatgcgacgccgctggcctatcagagccagccggatgagcagtgcgagtggtatcgcctgcgccatgaagaggcgatgacgccggatgcggtggtccgcctggcggaagcggcgtatgaaaaatatggtttcaacgactttaagctgaagggcggcgtgctggccggttttgaagaagccgaagcgatcagcgccctggcgaagcgcttcccgaatgctcgcgtcactctcgacccgaatggcgcctggctgcttgaggaggccattcagattggtaaacagctgaagggcgtgctggcctatgcggaagatccgtgcggcgccgaacagggcttctccggccgcgaagtgatggccgagttccgccgcgcgacgggcctgccgaccgccaccaatatgatcgccaccgactggcggcagatgggccatacgctgtcgctacaatcggtggatatcccgctggcggacccgcacttctggaccatgcaggggtcggtgcgcgtagcgcagatgtgccatgagttcggtctgacctggggttcgcactctaataatcacttcgacgtgtcgctggcgatgttcacccacgtcgcggcagcggcgccgggcaagatcaccgctatcgatacccactggatctggcaggagggcaaccagcgtctgaccaaacaaccttttgaaatcaaaggcggcatggtgcaggtaccgagtaccccgggcctgggggttgagctggatatggaccgcgtgatgcaggcaaatgagctatataagaaacatggtcttggcgcccgcgacgatgcgatggcgatgcagtatctgatcccgggctggacctttgacaacaagcgtccatgcatggtgcgctaaaagtccgccggcctctgcgggggccggcattgcgcgacagcgccaggggttggctcagagtaaggacagcagatgaaaatagtgatcgcaccggattcctggaaggagagcctgagcgcgctggaagtggccagtgcgatagagcaaggctttcgcgagatttatcctgacgccgagtatgtcaagctgccggttgccgatggtggggaagggacggtggaggccatggtggcggcgaccggcgggcttctggttccgctgacggtcaccgggccgctgggcgagccggttgaggcattttacgggctgtccggcgatcgccagtgcgcctttatcgaaatggcggcggccagcggcctggagagcgtcccgccggcgcagcgtaacccgctgctgaccacttcctggggtaccggggagcttatccgccatgcgctggacgccggggtaagacagatcattattggtattggcggcagtgcgaccaatgacggcggcgccgggatggcgcaggcgctgggggcgaaactgctgaccgccgagggccagcaaattgcctccgggggcggcgcgctggagacgctggcgcgaatcgatctcagcgaactcgattcgcggctggcagattgccggattgacgttgcctgcgacgtcaccaacccgttgaccggcccgcagggcgccagcgcggtgttcggcccgcaaaaaggggcgacggcgcagatgatcgaccggctcgatagcggcctacggcactatgcccggattatcgcccgcgatttagatatcgacgtgctgagccttgagggcggcggcgcggcgggcggcatgggtgcggcgctgtatgcgttctgtggtgctcagttgcgtccgggcattgagattgtcaccgatgcgctacagctggctgagcgggtggcggatgccgatttagtgatcaccggcgaagggcgtatcgatagccagacgatccacggcaaagtgccggtgggggtggcgagggtggcgaagcgttttaacgtcccggtgatcgggattgccggcagtcttaccgccgatgttggcgtcgtgcatcagcacgggctggatgcggtattcagcgtgttgtataccatctgtacccttgatgaagcgttggccaatgccgccgccaacctgcgaatgacggcgcgtaacgtagccgcggttttgcagatgggcgacaggcggtaacccggctggcgcagtggtatttgtagcccggataaggtgcgtagcaccgcgatccgggaaccatccccggtggcgcttacgcttaccggggctaccaaccgaataccggaccgtaggacgtagcccggatgaggcgcgtagcgccgctatccggggttcacacccccatccggcacgcttcgcgggccacattatccatctcatctaacagctcaagcagctccggctccagatcctcggcggcggtgcctgcccgtagctgactttccagggtatggcacagctttttcagccgcggcacgccgctatagctgcagctgccgtgcagtttatggatcagatccaccagcccttccggctgctcgcccaccagctgctcctcaactttgttacgcacctccggcataaaggcgatcagcatttgcagcatctcccgcgccaggtccggcttcatggccgcctggcgcagcgccagctgccagtcgagcgtttgattatgatcgacgatcggctctgcgggcggtagcgacgccggaacgacgctgtgcaggccgggctgatagcgcagcagcagtgcgtgcagtttctcttcttcgattggcttcgccagatagtcgttcatgccggcgctcagtaatttctcacgctggccctccagggcgtgcgcggtgaccgcaataaccggggtttgctgatgatgggacaggtgatggataagctcgcaggcgcggatgccgtccatatccggcatctgaatatccatcaggatcagatccatctgcagctgcttggccttgtccaccgcctgctggccgctgtcgcagaggatcacctgctgcacaagatcatccagcagggcgccaatcagcttcaggttagccgggttgtcgtcgacggccattaccgtcattggcaacttatgactgtcgatctgcatcagcggcgcggaggcaagcgcgtggctggtagccaccagcgccggtagcagacgggtggtggtgagcggctttaacaggcaggcggcaacgccgtcgcgcttcagggcttcggcgctgacctgggcatggcacggcagggccagcagtacgttatcggacatcgcgcaggctttggctaatttttcccgatgcggcgacaaatcgcgcattgaaaccgggataccgaccagcagaatgtcatactgcgcttccgccagcgaggagaaggtagggctatagataacctccagcggcgtagcggccagcatctccagggtacactgcgccgccgtcgcgttggcttccacataggccagacgtttgccgacaagcccgtcggtgttcagcgtatccggaatggcgttcgggttgagatcgaggctgatatggaaccagaaggtggagccgcggttcggctggctgtggaacgaaatatccccgcccatctctttgaccagacgctgagtgatcaccagcccgagcccggtgccgccgtggcggcgtgaaatactggcatcggcctgacggaaggcctggaatagccgggactggtcgcgctcggggatgccgatgccggtatcgtggatctgaatttcgatctgtacccgggaattactgatggcccgctgctccaccagtacgtcgatattgccgtgctcggtaaatttgatggcgttgcccacgaggttggtcacaatctgctgcagacgcagcggatcgccaatgacgttatccggtacattgttcttaatattcagcgtcagctccagccctttatcgtgcgcggaatgcgccagcagggtgaccacttcatcaagcgaagtgcgcagcaggaacggaatactctccaggatgagcttcccggcttccagcttggaaaagtcgagcacgtcattgatgatcgccagcagattgttggccgaacgttcgatggtggtcaggtggtcgcgctgcgtagcgttgagatcggttttcagcgtcaggcgggtaaagccgatcaccccattgagcggggtgcgcagctcgtgagacatattggccaggaactcagacttaatgcgcgccgcctcctgggcgcgctttttcgccaggtccagctcgacgttctggatctccatctgttcaagcgtttcccgtagatcggaggtcgcctggtcgacgttgtgttgcatctcttcgtggtatgccgccagcgacatggccatcgagttaatgccgtttttcagcatatccagttcgccgagcataaagccttcgacccggctgtccagctgtccgcggcggatgcggtcgacagtgttaaccatattgcggattggcccggtgacgtcgcgcatcagcctccagccgaagattaacgcgatgccgatacagaacagcatcattacgctggagataaaaatctctttgtactgctggaggcgaaccgattttagatccagctccagggcgacgtagcccagcatattgcccggcattttagcgtcagattcgggtgattcatccggagaatagctttccgagacaataggcgtgcgcaggatcatcatgtcgccatcgcggatgacgctgaggtgacgggggaatgcctcgcctttcgggatctgcagttcgctgggattgagctggtaattggaggtgacaaataagcggttatgcgaatcgtacaccgagatggcccgcacgatctccgagtggcgacgatgcagaacgctgatcagctggccgatggattcgcggttttgcaagttcatgccatattcgctggagaccgccagcggttcgataatactggcgccagcgtcctccagctggcgttgcaggtcgttataacgatgagcgacaaagaaaatactgagcaacagtcctatcaggacggttggcgccagaatcagaatcatcatgcgagcacgcaggctgtagttggtcatgcggttccattatgggagaatatagacatcatcgttctgtgcagcgtcgctgcgcctcgcggcgctgccgctctgaacgagctcgttttatttgattgagacaactctctacgatggcgcaattctactctgcaaaacggcgtgtgacgacgcgccagatcataaccgttacagtcaacgacctcgatccctttggtcagggtgttgcccgccaccaggggaaggcgctgttcgtgagcggcgtgctgccccacgagcaggccgaggtggtgctggtggaagataaaaaacagtacgcccgcgccgaggtgaaacgccgactgaccgacagcccgcagcgccaggcgccgcgctgcccccattttggcgtctgcggcggatgccaacaacaacatgccagcgttccgcttcagcagcaaagtaaacgcgccgcgctggggcgactgatgaagcgcgaggtagatgacgtcatcgccggcgcgccgtggggctaccgccgtcgcgcacgcttgagcttgaattatcagccgaagacccaacaattgcagatgggttttcgccaggtcaacgccaaagcgatcgtcgatgtggtgcagtgccctgttttggtgccccaacttgaggcattgctgcccgctgtgcgcgagtgcttaagcgcgctgagcgcattacgccatctcggccacgtcgagctggtgcaggcggacaatggcccgctgatggtgctgcgccataccgcagccctgccggcgacagacagggaaaaactggaacgcttttcgcaaactcacggtctttccctgtacctcgcgccacaaagcgagatactggagcaaattcatggcgaagcgccatggtatacctcagacggactacgcttagtgttcagcccgcgggattttatccaggtcaacgacggcgtaaatcagcagatggtgcgtaccgcactggagtggctggatctgcggccagaggaccgggtgctggatctgttctgcgggatgggcaactttaccctgccgctggcgacacgcgccgcccatgtggtgggcgtggaaggggtgccggcgctggtggagaaggggcgggaaaacgccgcccgcaatggtttatcaaatgtcactttcttccatgaaaatctggaagaagacgtcacccgtcaggcctgggcgaagcacggctttgataaagtgctgctggacccggcccgcgccggcgcgccgggcgtgatgccgcatataataaaactggcaccgcggcgggtggtgtatgtttcctgcaacccggcgacgctggcgcgagacagcgaaaccctgttgcaggctggatatcagattcaacgcctggcgatgctggatatgttcccgcataccggccatctggaatcaatggtgttgtttgagcgcaggcttacataaggtcattcacaacgtcgcagaagagccaccctggccatgaatgctgacgcgacctgcaggatgacatgtagaaagttgaggcttgccgacttcggcaggccggtcccttaaggagaggacaatggttgcggtaagaagtgcacatcttaataaagctggtgaatttgacccgaagaaatggatcgcgagtctgggaatttccagccagcagtcgtgtgagcgcttagccgaaacctgggattattgtcgcgaaaaaacgcaaggacacccgcaggcggacctgctgctgtggcggggcgtcgaaatggtggagatcctctccaccctaagtatggacatcgatacgctgcgcgcggcgctgctgttcccgctggccgacggcgaagttgtcagcgaagaggtgatgcaggagagcgtaggtaaatcggtcgtgaccctgattcacggggtgcgggacatggccgctatccgccagctgaaggctacccataccgactcagtctcttccgagcaggtggataacattcgccgtatgctgctggcgatggttgacgatttccgctgcgtggtcatcaaacttgctgagcgtatcgcgcatctgcgcgaggtcaaagacgcgccggaagatgagcgcgttcttgcggcgaaagagtgcaccaatatctatgctcccctggcgaaccgcttaggtatcggccagctgaagtgggagctggaagattactgcttccgctatctgcacccggcggaatacaagcgcattgccaaactgctccacgagcgccgtatcgaccgcgagcattacatcgaagagtttgtcggccacctgcgctcagagatgaaagccgaaggcgtcaaggcggaagtctatggccggccgaagcatatctacagtatctggcgcaaaatgcagaaaaaacacctcgctttcgacgagctgtttgacgttcgcgcggtgcgtattgtggctgagcgtttgcaggattgctatgccgcgctggggatcgtccatactcactaccgccatctgccggatgaattcgacgactacgtggccaacccgaaacccaacggttaccagtctatccataccgtggtgctggggccgagcggcaagacggtggagattcagatccgcacccggcagatgcatgaagatgccgagctgggcgtggccgcgcactggaagtacaaagagggcgcgggagccggcaccagcggcggccgcggctatgaagaccgtatcgcctggctgcgtaagctgattgcctggcaggaagagatggccgactccggcgagatgctcgacgaagtgcgcagccaggtcttcgacgaccgggtgtatgtctttacgccgaaaggcgacgtggtggacctgcctgcggggtcgacgccgctcgactttgcctatcatattcacagcgatgtcggccatcgctgcatcggcgccaaaattggcggccgcatcgtgccattcacctaccagctgcagatgggcgatcagatcgaaattattacccagaagcagccgaacccgagccgtgactggctgaaccctaacctcggctatgtgaccaccagccgcggacgttcgaagatccacgcctggttccgtaagcaggatcgcgacaagaacattctcgccggtcggcagatcctcgacgacgagctggagcatttgggcatcagcctgaaggatgcggaaaagcacctgctgccgcgctataacttcaacgagctcgatgaactgctggccgccatcggcggtggcgatatccgtctcaaccagatggtcaacttcctgcaggcgcagttcaataaacctagcgccgccgagcaggatgcggccgcgctgaagcaactgcagcagaaaacctacacgccgcaaaatcgcaccaaggacaatggccgggtagtggtggaaggggtaggcaacctgatgcaccatattgcccgctgctgccagccaatcccgggcgacgagatcgtcggctttatcacccaggggcgcgggatctccgtgcatcgcgcggactgcgatcagctggcagaactgcagtcgcatgccccggagcgcatcgtcgatgcggtatggggcgaaagctactcggcgggctactcgctggtggtcagggtggaggcgaacgatcgcagcggtttactgcgcgatatcactaccatcctcgccaatgagaaggtgaacgtgctgggcgtcgccagccgcagcgatacccgtcagcagctggcaaccatcgatatgaccatcgagatttacaacctgcaggtgctgggccgggtgctcggtaagctcaaccaggtgccggatgtgatcgacgcgcgccgtctgcacggcggttaattcgtctgtaggccggataaggcgaagccgccatccggcaatttcgcaacgtcggataaggtctaaacgccttatccggccgactattttttaaatttccaggattgtcacatgactcaaattgaccgcttgctcggcatcatgcgccgcctgcgcgacccggaaaacggctgcccatgggataaagagcagacctttgccactatcgccccttacacccttgaggagacctacgaggtcctcgatgctatccagcgggaagattttgacgatctgcgcggtgaactgggcgatctgctgttccaggtggtgttctatgcgcaaatggcgcaggaagagggacgctttaactttgacgatatctgcgccgccatcagcgacaagctggagcgtcgccacccgcatatcttcggcgaggcatcggcgggcaatagcacggaagtcctggcccgctgggagcaaatcaaaagcgcggagcgggcggaaaaagcccagcattcggcactggacgatattccccatagcctgccggcgctgatgcgcgcgcataaaatccagcgccgctgctcggcagtgggtttcgactggacctcgctgggcccggtgctcgacaaagtgcatgaagaaattgatgaagtgatgcatgaagcgcagcaggcggtggtggatgaagcaaaactggaagaggaagtgggcgatctgctgtttgccacggtgaacttatcccgtcatttgggcgtcaaagccgaggtggcgctgcagaaagcaaacctcaaatttgagcgtcgcttccgcgaggtcgagcgtattgtcgccgcccgaggcctggaaatgaccggcgtcgacctcgataccatggaagaagtgtggcaggaagtaaaacgccaggaaactgatctctaacggattttcgtgatcaggcgcgatttgtgtgattttataaataacaagcgcttgatttacgtcaaaaacatttcgccaaaagcgtctattttctctttccgttatgtcgttgaaacaccatgtagcctgcctcttcgagttgttcgagtcgcaacacaggtgcaacttgaagaacgaaggggaggggaagaatgaaagtttgtggcgtcacgcatgttcgggtatactactttcccgtcctggttattccatcgttttaccctaacttctcaggttcagcatgacaacgaactatatttttgtgaccggcggggtcgtatcctctctgggtaaaggcattgccgcagcctccctggcagccattcttgaagcccgtggtctcaacgtgaccatcatgaaactggatccgtatatcaacgtcgatccgggcaccatgagcccaatccagcatggggaagtgttcgttactgaagacggcgcagaaaccgatctggacctgggccactatgagcgttttatccgcaccaagatgacgcgccgcaataacttcaccaccggccgtatctactccgacgtgctgcgcaaagagcgccgtggcgactacctgggcgcgaccgttcaggttatcccgcacatcaccaacgctatcaaagagcgcgtactggcgggcggcgaaggccatgacgtcgtgctggtggaaatcggcggtaccgtaggcgatatcgaatccctgccgttcctcgaagcgattcgtcagatggcggtagagatcggtcgcgagcataccctgttcatgcacctgactctggtgccgtacatggccgccgcgggcgaagtcaaaaccaagccgacccagcactccgtaaaagagctgctctccatcggtattcagcctgatattctgatctgccgctccgatcgcgcggttccggccaacgaacgagccaaaattgctttgttctgtaacgttccggaaaaggctgtgatttctctgaaagacgtcgattccatttataaaattccgggcctgttgaaatctcaggggctggacgattatatttgtaaacgattcagcttaacttgtccggaagcaaacctggccgaatgggaacaggtaatctatgaagaagctaatccggcaggcgaagtcaccatcggtatggtcggtaagtacattgaactgccggatgcctacaagtcggtgattgaagcgctgaaacacggcggtctgaaaaatcgcgttaccgtcaacatcaagctgatcgattcgcaggatgtggaaacgcgcggcgtcgaaatcctcaaggatttagacgctatcctgatcccgggcggcttcggctaccgcggcgttgaaggcaagatcgccaccgcgcgctatgcgcgtgaaaacaatattccttatctgggcatctgcctgggtatgcaggttgcgctgattgagttcgcgcgtaacgtagcgggtatggaaaacgccaactcgacggaatttgtgccagactgtaaatacccggtcgtggccctgattaccgaatggcgtgacgaagatggcaacgttgaagtccgctctgagaagagcgatctgggcggcaccatgcgcctgggcgcgcagcagtgccagctgagtgatgattctctggtacgccagctttacggcgagccgaccatcaccgagcgtcatcgtcaccgctacgaagtcaacaacatgttgttgaaaccgattgaagctgccggtctgcgcgttgcgggccgttccggggatgatcagttggtcgagatcatcgaagtgccgaaccatccgtggtttgtggcctgccagttccacccggagtttacttcgacgccgcgtgatggacacccgctgtttgccggctttgtgaaagccgcgagcgagtaccagaaacgccaggcgaagtaaaaagagtttgaacggcaatgcacccatccgggtgcattgtttgtctggagttttagtttaacttgtactgaggaaaacctaatgtccaaaatcgttaaagtcatcggtcgtgaaatcatcgactcccgtggtaacccgactgttgaagccgaagtacacctggaaggtggtttcgtcggtatggcagctgctccgtcaggtgcttctactggttcccgcgaagcgctggaactgcgcgatggcgacaaatcccgtttcctgggtaaaggcgtaaccaaagctgttgctgcggtaaacggcccgatcgctcaggcaatcctgggcaaagatgctaaagatcaggctggcatcgacaagatcatgatcgacctggacggtactgaaaacaaatctaacttcggtgcgaacgctatcctggccgtttctctggcgaacgccaaagcagctgctgcgtccaaaggcctgccgctgtacgcgcacatcgctgaactgaacggcactccgggcaaatactccatgccggttccgatgatgaacatcatcaacggcggtgagcacgctgacaacaacgtcgacatccaggaattcatgattcagccggttggcgcgccgaccctgaaagaagcagtacgcatgggttctgaagtgttccatcacctggcgaaagtgctgaagtccaaaggcatgaacactgccgttggtgacgaaggcggctacgcgccgaacctgggttccaacgccgaagcgctggctgttatcgctgaagcggttaaagctgcaggctacgagctgggcaaagacatcaccctggcgatggactgcgcggcgtctgaattctacaaagacggtaaatacgttctggctggcgaaggcaacaaagcgttcacctctgaagagttcactcacttcctggaagagctgaccaaacagtacccgatcgtctccatcgaagatggtctggacgaatctgactgggaaggtttcgcttaccagaccaaagtactgggcgacaaaatccagctggttggtgacgacctgttcgtaaccaacaccaagatcctgaaagaaggcatcgaaaaaggcatcgctaactccatcctgatcaagttcaaccagatcggttctctgaccgaaactctggctgctatcaagatggcgaaagacgctggctacaccgctgttatctctcaccgttctggcgaaactgaagacgctaccattgccgacctggctgttggtaccgctgcaggccagatcaaaactggttctatgagccgttctgaccgcgttgctaaatacaaccagctgattcgtatcgaagaagcgctgggtgagcaagcgccgttcaacggtcgtaaagagatcaaaggtcaggcttaatcctgtccttgtgaaataatcatgccagccttcgggctggcattttttttacgcctgcggccattatttaaagtcgacggccatttgctgagggatcgacaacccgcgggtggtttccacgcagcggtcgatgtaatcggtaaagcgcggcggttttggcatccccatgctcagcagcttgtcgttactaaagcgcacgttcagggtggcgaatgcgccgtataagcgcatggctttcagcatcagccgctcattgcatggcccaaatatccctttcagttcgcgtctcattttgaccagcgtttcatagctcacctgggcgtacttatcccccaccggcgcctgctccagggcctgagccatcgccaggtcgatttcggcaaacttcacgctgttctcttcgccagcagagatatgcaccacctcgccgtgagccagaggctggttaagcagcattagcagggcgtcggcgcagtagtccaccgggataacgtcaattcggtcctccatggagcacatgaatttctgcagcatcagccccatgctgaacacccagaaaatactgctggaaggccggcagccgtgatgggtatgacccaccacgatagaggggcgggcaattaccagcggtagcgtagggcactgctgctgcatcagctgctcgatggtcgacttcgagtgggtatattccaccaggtgctcagcgcgttcccgaaactccgcgctttcggcgaccagtgaatccggttcaggcgaacatgacatcgccgtaccgacgtgcagaaagcgctgcagacccgtcacctgcgccatacgttgcgccaggcgcagcgtgccctcaacgttaaccttccagataagcgggttgctgccaaatgaagcgacagcggcgcagttgaggatgtgcgtgacctgatcgaggcgcggatcgttaagaaaatgctccggagaggcgagatcgcccagcaggatatgctgctggcgcaacatcgccagcttctcctcggcgatgttgaacttacgcatgttctctttaacccgttcgaggccagcctcggggctatcagcacgtaccagcagcagcagatctaaccgggtttcctgatggagtattttctctaacgcggcaccgcccagaaaccccgtaacgccggtaattaataatgtggtcataaacgctatctcattatggttggtctgcgggattctaggcgggcaaaagtaaacgacaattaaataaaaaaggggcccgatcagggctttattaagaccagtttaaggttattattaccgggggatagaattggactcgcagatcggccagataattcactctttcatgtatcagtttgtacattactgtattttaaggttttttattttggttcttggaccttttattttatcctgaatgacaggaataacattttctgttacatatttccccccgcgcgtcagaatgctatttattttaattcttaccatgctaataaactaagccaaaagaaaagattgcttttttaatcaataatattattcccgacacggatattgacggaggggtaaaaaagcgatcgcagcgcaggacaagacctgggcagcgaaatctgcgataatgaacgtttatcaccctaaacagagatgactatgcagtacccgattaacgagatgttccagaccctgcaaggcgagggttacttcaccggcgtgcctgccatctttattcgtctgcagggatgcccggtaggatgcgcgtggtgtgacaccaagcatacctgggacaagctggccgatcgggaagtgtcgttgttcagcatcctggcgaaaaccaaagagagcgacaagtggggcccggcaagcagcgaggatctgctggcgattattgggcggcaggggtggacagcccgccacgtggttattaccggcggtgagccctgcattcatgatttaacgccgttaacctcgcttctggaacaaaacggctttagctgtcagattgaaaccagcggcacccatgaagtacgctgcagccccaatacctgggtgacggtttccccgaaggtcaacatgcgcggtggctatgacgtgctgtctcaggccctgcagcgggcggatgagatcaagcatccggtagggcgcgtccgcgacatagaagcgctggacgaactgctggaaacgctgagcgatgacaaaccgcggatcatcgccctgcagccgatcagtcagaaagaagatgcgacgcgcctgtgtatcgatacctgcatcgcccgcaactggcgcctgtctatgcagacgcacaagtatctgaatattgcctgataaaaaagcccggcagcgtactgaccgggctttttttcgcttactcgccgcgatagacgcagccggcggtgcaggtctctttgaccatcacggcgctgagcagcggcacccgcggtttcatctcatcccagatccatttggccagcacttcgctggtggggttttccagaccagaaatatcgttcagataatagtggtcgaggcgatcgtatgtcggcttaaaggcggccttcagctcggcaaaatccatgatccacccggtatggggatcgacttcaccggtgatctccagacgcaccataaaggagtggccatgcaggcgaccgcatttgtgtccttccgggacgtgcggcaggtggtgggcggcttcgaaggtgaaatctttaaacagcgtggtggacatcattgactctcaacaggacgaaaaaaaccgccgtagggtaccggaaagtacattttttcgcattaactaaaacggccgtgaacagaaaatagacatgttcatctgctttatttgagttaatctcttatatttcaattgcttatttaatcgattttgttgttaataactacaactaaaacaggttagtccatttggttatttattatttccatcccttctttaattgttactatgcccgccgttaaccttctattctcttctgtttttgtcgcgctgacagggtgcgaataacagctttgcttactggaacaaacgacgcatgacgacacaggccccaccttccaacttgctaccgctcaacccggagcaactggcgcgccttcaggcggccaccactgacttcacgcccactcagctcgcctgggtatctggctatttctggggcgtgctgaatcagcagtccggcgcggcggtagccgaacccgccccggccgccgaggtaccgacgatcacgctgatttccgcctcgcaaaccggcaacgcccgccgcgtcgccgaagcgctgcgtgacgatctgctggcggcgaagctgaacgtgaagctggtgaatgcaggcgattataaattcaaacaaattgctgcggaaaaactgctggtggtagtgacgtccacccagggggaaggagagccgccggaagaagcggtcgcattgcataagttcctgttctctaagaaagcgccgaagctggacgggaccgcgttcgccgtctttggtctcggcgatacctcttatgaatttttctgtcagtccggcaaagatttcgacaacaagctggccgagctcggcgcggaacgtctgctcgatcgcgttgatgccgacgttgaatatcaggccgcggccgctgaatggcgcgcgcgcgtggttgaggcgctgaaggcccgtgcgccggtcgctgcgcccgctcagctggccaccagcggcgcggtgaacgatattcacaccagcccatataccaaagaagcgcccctgacggcgaccctgtcggtcaatcagaaaatcaccggccgcaattcagaaaaagatgtgcgccatatcgaaatagacctcggtgattccggtctgcgctatcagccgggcgacgccctgggcgtctggtaccagaacgatcctcagctggtgaaagagctggtggagctgctgtggctgaaaggcgacgagccggtgaccgttgagggcaaaactctgccgctgtcggaagccctgcagtggcattttgagctgacggttaacaccgcgactatcgttgaaaactacgccaccctgacgcgcagcgaatcgctgctgccgctggtgggcgataaagctcagttgcagcagtatgccgccgcgacgccgatcgtcgatatggtccgtttctctccggcgcagctggacgctgaggcgttaatcggtctgctgcgtccgctgacgccgcgcctgtactccattgcttcctcacaggcggaagtggagagcgaggtgcatgtcaccgtgggcgtggtgcgctatgaaattgaaggccgcgcccgggctggcggcgcctccagtttcctcgccgaccgcgtggaagaggatggcgaagtccgtgtctttatcgaacacaacgacaacttccgtctgccagccaacccggagaccccggtgatcatgattggcccgggcaccggtattgcgccgttccgcgcctttatgcagcagcgcgctgcggacggagcgcaaggcaagaactggttgttcttcggcaacccgcacttcaccgaagatttcctctatcaggtggagtggcagagctatgtgaaggaaggtctgctgacccgtatcgatctggcctggtcccgcgatcaacaacaaaaaatctatgttcaggacaaactgcgcgagcagggggccgagctgtggcgctggatcaatgacggcgcccacatttatgtctgcggcgacgccaatcgcatggcgaaggacgtggaaaacaccttactggaagtgattgccgaatacggcgcgatggacgccgaagcggcggacgaatttttaagtgagctgcgcgttgagcgccgttatcagcgagatgtctactaatgagcgaaaaacatccggggcctttagtggtcgaaggtaaactgagcgatgccgagcgcatgaagcttgagagcaactacctgcgcggcaccattgcggaagatttaaacgacggtctgaccggcggttttaaaggcgataacttcctgctgatccgtttccacggcatgtaccagcaggacgatcgcgatatccgcgcggagcgcgccgcccagaagctggagccgcgtcatgcgatgcggctccgctgccgtctgccgggcggggtgatcaccaccacccagtggaaggcgatcgataagtttgccgctgagaacaccatttacggcagtattcgcctgaccaaccggcagacctttcagttccacggcattctgaaaaagaacgtcaggccggtgcatcagatgctgcactcggtggggctggacgcgctggccaccgccaacgatatgaaccgtaacgtgctgtgcacctccaacccctacgagtcgcagctgcacgctgaggcctacgagtgggcgaaaaagatctccgagcatctgctgccgcgtacccgcgcttatgccgagatctggctggatcagaaaaaggtcgccactaccgacgaagagccgatcctcggccagacctatctgccgcgtaagtttaaaaccacggtggtgatcccgccgcagaacgatatcgatctgcacgccaacgacatgaacttcgtggcgatcgccgaaaacggcaagctggtgggctttaacctgctggtgggcggcggtctctctatcgaacatggtaacaaaaaaacctacgcccgcacggcgagcgaattcggttatctgccgctggagcatacgctggcggtggcggaagcggttgtgaccacccagcgcgactggggcaaccgtaccgaccgtaagaatgcgaaaaccaagtacacccttgagcgcgtcggtgtcgaaaccttcaaagcggaagtggagcgccgggcaggcattaagtttgagccgatccgcccgtacgaatttaccggccgcggcgatcgcatcggctgggtgaaggggattgatgataagtggcacctgacgctgtttattgaaaacggccgcattctcgattatccgggtcgtccgctgaagactggcctgctggagattgctaaggtccatcaaggcgaattccgcatcaccgctaaccaaaacctgattgtcgccagcgtaccggaagatcagaaggcgcggatcgagaagctcgcgcgggatcatggcctgatgaatgccgtcaccccgcagcgcgaaaactcgatggcctgcgtctccttcccgacctgcccgctggcgatggcggaagccgagcgtttcctgccgtcgtttatcgacaaggtggaagggctgatgagcaagcacggcgtgagcgatgagcatatcgtcacccgcgtcaccggctgcccgaacggctgcggccgcgcgatgctggcggaagtgggactggtgggcaaagcgccgggccgctataacctgcacatcggcggtaaccgcaacggcacccgcatcccgcggatgtaccgtgagaatattaccgagtcggaaattctcgactcgctagacgaactggtagggcgctgggcgaaagagcgcgaagcgggtgaaggcttcggcgattttacggtgcgtgcgggcatcattcgcccggtgctcgacccagcccgcgatttctgggaataacatcctggtgcccggtggcgcgtagcgatccgggccagcgaaacccgtaggccggacgaacgcagtgtcgtccggcaaaacaggcaaacgaggttcatatgtccgtactcgatctaaacgcgcttaatgcattgccgaaagtggaacgcattctggcactcgcggaaaccaacgcccaactggaaaagcttgacgccgaagggcgtgtggcgtgggcgctggaaaatctgccgggaaactatgtgctgtcgtcgagctttggcattcaggcggcggtcagtttgcatctggtgaatcagatccgcccggacattccggtgatcctcaccgataccggctacctgttcccggaaacctatcagtttattgacgagctgaaggacaagctcaagctgaacctgaaggtctaccgcgcggctgaaagcgcggcctggcaggaggcgcgctacggcaagctgtgggagcagggcgttgagggcattgagaaatacaatgagatcaacaaggttgagccgatgaaccgggcgctgaaagagctcaacgcgcagacgtggtttgccggtctgcgccgcgagcagtcgggcagccgggctacgcttccggtgctggcggtccagcgcggggtgttcaaggtgctaccgattatcgactgggataaccgcacggtgtatcagtacctgcaaaagcacgggctgaagtaccacccgctgtgggatcagggctatctctcggtaggcgatacccacaccacccgcaagtgggagccgggcatggcagaagaagagacccggttcttcgggcttaaacgcgagtgcggattgcacgagggttaagctgttagctcttcctctgagtgataattcaaaaagaacacgcgggcgataccgcgcgttcttttgtgcgtattagcttttcttctccactttcgccagctctttcaccagcggcagcatgactttcactacctcgcgtccgcggtgttcgatgcgccccggcagcgcgtggtcgatatactgctgattatccagctggacgtcatgccaactggttccctgcgggaaactggccgatttgctccgctgctgatagccatcttttttgccgagtgaccagttagtcgcctcgaccgacagcaccgggatcccggcgttgtcgaagacgctggcgtcattgcagcagctggtgcctttcggataagccgggttgagtcccgggttggtgtaggcggcgatgcccttgctgcgagcgatagccagcgcgcgatcgcgggtcagcttgcgcaccgaggccggcgtgctgcggccgctgttgaagtaaagcttatcgcccaccaccagattatcgagattgatcaccagcagggtatttttcttttccgcttcgctcatccgctgcagcaggttttgcgcgccgagacggccttcctcttcaccgctggtggcgataaagcggatgccatagcgggtagggacgttctttaaatgctccgccagctccagcaacacgccaagtcccatcgcgttgtcgtcgatgccctgcagcgtcaggccgccgaggttgttctccacgtctttatcgctctgcggcgcataggtgtcgaggtgtgccatgataataatctgctggcgcactttaccttcatgggcggcgatcaccgtactgccggtggcgttatgccagttcttgcgctgattgctgtcggtatagatatagcgggtattgaagcttcgcacgtcgctctgataccccatcagggcgaactgctggcgcagatagtcagctgagagcatttccggcggcgttccggtcattcgtcccgggaagacggtggcgatatggcgggcctggctactggcggtgtcgcccagcgcgctgaatgcgggggcggcggcaaaaacaaaaccggtgccgagcgccagcggaagcagacggcggcacaacgcggaaaacataaggggtccttacacgaacaagacaatttgacgcgtacagtatgaaactgtgaccgcggttaaacaatttcaattgctcttaaatagcggaaaaatagcgcgttaagcactttttgatatttgtatttccgccgcgttattcctttgtgtcacaactcattccatttcgtaatttcatttgctctaaggcgcaccctatagtcgcagtatcgctgaatgtaagagagttgttgcaccgtggattacttgcccctttttgccgaactgaaacaaaggcccgtgctggtgatcggcggcggcgagattgctgaacgtaagatcaagttcttgctgcgcgcccaggcgcaggtgcaggtggtcgctgaaacgctgtcaccggcgctggccgatctggctgcgcgccaggcactcagctggcgggcgacggaattcagcgactcgctggtggatgatgtctttctggtgattgcggccaccgaggatgaggcgcttaaccagcgggtatttgcggcagctaacgcgcgctaccggttggtcaacgtggtggataaccaggcgctgtgctcgtttgttttcccttctatcgtcgaccgttcgccgctgctggtggcgatctcctccagcggtaaagcgccggtgttgtcgcgcattctgcgtgaaaaaatcgaagcgctgctgccgacgaatctcggtcggctggcggaatcagcaagctactggcgcaaccatctgaaaacccgcctgacgactaccgaagcgcgtcgccgcttctgggagcgcgtctttaccggccgcttcgccagcctgatggtggcgggcaactctgcggaggcggaaaaggcgctgcaggatgagctggataagcccgaacgcgagacgggagaaattattctggtcggcgccgggccgggcgatgccgggctgatgacccttcgcggtctgcaggcgatccagcaggcggacgtggttttccacgaccatctggtgactcagccggttctcgagctggtgcgccgcgatgccgagctgatctgcgttggcaaacgcgccggcgagcactcggtgccgcagcatgaaaccaatcagctgctggtggaggcggcgaaggcggggaaaaccgtcgtgcgcctgaagggcggcgatccgtttatttttggccgcggcgcagaagagctgcaggctgccgccgaggcggggatcccgttccaggtggtgccgggcgtcaccgctgccgccggggcgacggcctacgccggtattccgctgacccatcgcgattatgcgcaaagcgccgtctttgtcaccggccactataagccggacagcgcccccttcgactggtcgctgctggcgaagagccaacagacgctggcgatctacatgggcaccatgaaggcggcggaaatcagcgcccagctgatcgcccacggtcgcgacagcgacacgccggtggcggtgatttcccgtggcacccgtgacgatcagcagacgataaccggcacattgcaacaactcgaacacctggcgaaagacgccccgatgcccgccctgctggtggtaggcgaagtggtgcagctgcatcagcagctcgcctggtttcaacatacatcatccgccgaggggtttaacgcttcggtggtcaatctggcttaaggaacggttatggaccaaaaacgactcactcacctgcggcaactggaggcggaaagcatccatattattcgtgaggtggccgccgaattttctaacccggtaatgatgtactccatcgggaaagattccagcgtaatgctgcatctggcgcgcaaagcgttttatccgggaaccctgccgttcccgctgctgcacgtcgataccggctggaaattccgtgagatgtatgagttccgcgaccggaccgctaaagcctacggctgtgaactgctggtgcataaaaacccggaaggggtggcgatgggcatcaacccgtttgtccacggcagcgccaagcataccgatatcatgaaaaccgaaggcctgaagcaggcgctgaacaaatacggctttgacgccgcgttcggcggcgcgcgtcgcgacgaagagaaatcccgcgcgaaagagcgcatctactccttccgcgaccgtttccaccgctgggacccgaaaaatcagcgtccggagctgtggcacaactacaacggccagattaacaaaggcgaaagcatccgcgtcttcccgctctccaactggaccgagctggatatctggcagtacatctatctggaaaatattgaaatcgtgccgctgtatctggccgctgagcgtccggtgctggagcgcgacggtatgctgatgatgatcgatgacgaccgtatcgatctgcagccgggcgaggtgattgaaaaacggatggtgcgtttccgtaccctcggctgctggccgctgaccggcgcggtggagtctgaagcgcagacgctccccgaaattattgaagagatgctggtatcgaccaccagcgaacgtcaggggcgcgtcattgaccgcgaccaggccggctcgatggagctgaagaaacgtcaggggtatttctaaggagccgccatgaacacgaccattgcccaacaaattgccaacgaaggcggcgtagaagcttacctgcacgcgcaacagcacaagagcctgctgcgttttttgacctgcggcagcgtcgatgacggcaaaagcaccttaattggccgcctgctgcacgatacgcgccagatctatgaagaccagctctcttcgctgcacaacgacagcaagcgtcacggcacccagggcgaaaagctggacctggcgctgctggtggacggcctgcaggccgagcgcgagcagggcatcaccatcgacgtggcctatcgctacttctcaaccgaaaaacgcaaatttatcatcgccgacaccccggggcacgagcagtacacgcgcaatatggccaccggggcgtccacctgcgacctggcgatcctgctgatcgatgcgcgcaagggcgtgctcgaccagacccgccgtcacagcttcatctcgacgctgctgggcattaaacacctggtagtggcggtcaacaaaatggatctcgtcgagtttagcgaagcgcgcttcaacgagatccgggaagattatctgacctttgccgagcagctgccgggcaaccttgatatccgctttgtgccgttgtcggcgctggaaggcgataatgtcgccagccagagcgcgaatatgccgtggtacagtggcccgacgctgctggaagtcctcgaaaccgtggagatccagcgggtggtcgagagccagccgctgcgctttccggtgcagtatgttaaccgtccgaaccttgatttccgcggcttctccggcacggtcgcctccggtaccgtgcaggttggccagcgtctgaaggtgctgccgtcgggcgtcgaatcgagcgtggcgcgtatcgtcaccttcgacggcgacctgcaggaagccgccgccggcgaagccattacccttgtgctgaaagatgaaatcgacatcagtcgcggcgacctgctggttgacgcgcaagcctcgctgccggcggtacaaagcgccagcatcgacgtggtgtggatggccgaacagccgctgaccccgggccagagctacgacatcaaaatcgccggcaagaagacccgcgctcgcgtcgacgctatccgctaccaggtcgatattaacaacctgacccagcgtgaagtcgagtctctgccgctgaacggcatcggcctggtggagctgacctttgacgaacctttagtgctggatccgtatcagcaaaacccggtgaccggcgggcttatctttatcgatcgcctgaccaacgtcaccgtcggcgccgggatggtcaacgagccgcacctgcaggcatcgacttcggcatcacagtacagcgccttcgagctggagctgaaccagctgatccgtaaacatttcccgcactgggacgcccgcgacctgctgggaggcaaataatggcccagcatgacgaaaacgtcgtctggcatgcccaccctgtgacccaacagcagcgggaacagcatcacggccatcgcggcgtggtgctgtggtttaccggcctttcggggtcgggtaaatccaccgtcgctggggcgctggaggaggccctgcatgagcgcggcgtcagcacctatctgctggacggcgataacgtgcgccatggcctgtgcagcgacctgggattcagcgatgaggatcgcaaagagaacattcgccgcgtcggggaagtggccaggctgatggtcgatgccgggctggtggtattgacggcatttatatctccgcaccgtgcggaacggcagatggtgcgcgagcgcctcggggaaggacgctttatcgaagtgttcgtcgataccccgctggccatctgcgaggcgcgggatccgaaaggattgtataagaaagcgcgggcaggggaattacgcaatttcaccggtatagactcggtctatgaggcaccggaaaaggcggaaattcatctggatggtgaacaattggtaacaaatttggtgcaccaactattagacctgctgcaacagagcgatattatcagatcctgaaacggcagcggcatcgaggggtgccggttgcccggtctacaggattcgatatgcgcaatacccagaacctcagtattattcgttcagaaccgcctccggcgatcggcgacgagaccacctggtctttgtcgggcgctgccgtgggctttatttcgtggctgctggcgctgggtattcccttccttctctatggcagtaatacactcttctttctcctctacacctggccattcttccttgcgttgatgccggtggcggtggtggtcggtattgcgctgcactctctgctcaatggcaaactgctctatagcgtcagcgcgaccatcctgaccgttgggctgatgtttgcgctactcttcctctggctgttgggataacccgttgctggtatgaatcaagcatgggtatcgacagcaaaaatatggtacagtccccgcgttacgcggcatcgtccgcgcgccccggtagcgtacccgggcgagttttgggatgatgatgccgtttttcagggggcaggatgggtaaactaacgctgctattattagctttgctggtctggctacagtattcgctgtggttcggtaaaaacggcctgcacgactacacgcgggttaacgacgacgtcaccgcccagcaggcgactaacgccaaattaaaagcacgcaacgatcagctgtttgccgaaattgacgacctcaacggcgggcaggaagcgattgaggagcgtgcgcgcaatgaactcagcatgacccgcccgggcgaaaccttctatcgtctggtaccggatgcgtctaaacgcaatcaggcatcggggcaacagcagaacaatcgataaccaggcccaggattacaacatggcagccacttttccgggcgtttgcgccgtggtgccggcagccggtttcggccgccgcatgcaaacggaatgcccgaaacaatatctctcaatcggtaacaaaacgattctcgaacacgcggtcgccgcgctgctggcggatgcgcgcgtccagcgggtggtgattgccgtcagccccggcgatcgccgcttcagccagctgccgctggcgcagcatccgcagattaccgtggtggatggcggcgctgagcgcgccgattcggtactcgccggcctgcgggcgttgccggaggcgcagtgggtgctggtgcatgacgccgcgcgcccctgcctgcatcaggacgacctcagccgcctgctgtcgctctgcgaaaccagccgcgtcggcgggatccttgcggcgccagtgcgcgacaccatgaagcgcgccgagccgggcaaaaccgctatcgcccataccgtcgaccgcaatgacctgtggcatgcgctcaccccgcaacttttccctcgcgagctgctggtggattgcctcactcgcgcgctaaacgagggagccactatcaccgatgaagcctcggcgctggagtactgcggcttccatccgcagctggtcgccggacgcgcggataatattaaagtgacgcgcccggaagacctggcgctggctgaattttacctcacccgttcccgacaccaggagaaagcttaatgcgaattggacatggttttgacgtacacgcttttggcggtgaaggcccaatcatcattggcggggtacgcattccttatgaaaaagggctgctggcccactccgacggcgacgtcgcgctgcatgcgctgaccgacgcgctgcttggcgccgcggcgctgggcgatatcggcaagctgttccccgataccgatccggcgtttaaaggtgccgatagccgcgaactgctgcgcgaagcatggcgccgcattcaggccaggggctatacgctcggcaacgtcgacgtcacgattattgcccaggcgccgaaaatgctgccgcatattccgcagatgcgcgtctttatcgctgaggatctcggctgccatatggacgacgtcaacgtgaaagcgaccaccaccgagaagctcggcttcaccggccgcggggaagggatcgcctgcgaagcggttgcgctgctgcgtaaggccgacaaatgatcgcctttgaccaactgacctggctgcacggcaagccgcagagcagtgggctgctgaaagccaatccggaagattttctggtggtggaagatctgggatttgccccggacggcgaaggcgaacacgtgctggtgcggatcctgaaaaacggctgcaatacgcgctttgtcgccgacgcgctggcgaaattccttaagatccacgcccgtgaagtgagcttcgccgggcaaaaagataagcacgcggtcaccgagcagtggctgtgcgcccgggtgcccggcaaagagatgccggacctgagcaaatttcagctcgagggctgccaggtactggaatatgctcgccataagcgtaagctgcgtttaggcgcgctgaaaggcaaccagtttaccgtgatcctgcgcgagattagcgatcgccaggacgtggagacgcgtctgcaggccatcgctgaacggggagtgccgaactatttcggcgcgcagcgcttcggcattggcggcagtaacctgcagggtgccctgcgctgggcggagagcggcgcgccagtgcgcgatcgcaataagcgcagtttttggttgtcggcagcccgcagcgcgttgtttaatcagcaagtgagtattagattaaaaaaaacggaatttaatcaggtcgttgatggcgatgcgctacaattagcggggcgcgggagctggtttgtcgtcacaccggaagaactcgaggtttcgcaggcgcgggtgcataaccgcgaactgatgattacggccacgctgccgggcagcggcgactggggaagccagcgcgacgccctggctttcgagcaggccgcgatcgccgaggaaaccgcgttgcaggcgctgctggtacgggagaaagtcgaggcggcgcgccgggcgatgcttctctatccacagcagctcagctggaactggtgggatgacgtaaccgttgaactgcgtttctggctgccggcgggcagcttcgccaccagcgtggtcagggagcttatcaatacaacgggtgactatgcgaatattgctgagtaacgatgacgggatccatgcgccggggatacagaccctggcgaaggccttaagggagtttgccgaggtccaggtggttgcacccgatcgtaaccgcagcggggcctcaaattcgctgacgctggaatcgtccctgcgtacgtttacctttgaaaatggcgacatcgccgtccagatgggcaccccgaccgactgtgtctatctcggcgtgaacgcgctgatgcgcccgcgtccggacatcgtggtttccggtattaatgccggccccaacctgggcgacgacgtcatctattccggcactgtggccgcggcgatggaaggccgtcatctggggttccccgcgctggccgtgtcgctgaacggctatcagcattacgataccgccgcggcggtaacctgcaccattctgcgcgccttaagccgcgagccgctgcgtaccgggcggatccttaacatcaacgtgccggatctcccgcttgatcaaatcaagggcattcgcgtgacccgctgcggcaaccgccatccggccgaccaggtgatcccgcaacaagatcctcgcggcaacaccctgtactggattggcccgccgggcgataagcgcgatgccgggccgggcaccgattttgcggcagtggatgaaggctatgtttccgtgacgccattgcacgtcgatttaaccgcccatcaggcgcatgaggtggtcaccgattggctggaacgtgtcggggttgacaggcaatggtaagtaaacgtgttgaaagtttgttgaatcaactgcgcacgcagggcatcgtcgatgaacgtgtcctcgaggcgatcgcgctggtcccgcgcgaaaagtttgttgatgaagcctttgaacataaagcgtgggaaaacaccgcgctgccgattggccaggggcagaccatctcccagccgtatatggtggcgcggatgaccgagctgctgacgctgacgccggagtcgcgggtgctggagatcggcaccggttccggctaccagacggccatcctggcgcatctggtgcatcacgtatgctcggtagagcgaattaagagtttacagtggcaggcgcgtcgtcgcctgaaacaacttgatttacataatgtttcaacccgtcatggcgatgggtggcaaggttggcaggcgcgggcgccgtttgatgccattattgtgacggcggcgccgccggaaataccgaccgcgctgctggcgcagctggatgatgacggcgtgctggtgctgccggtcggcgaagagcatcagtttctcaaacggatccgtcgtcggggcaacgaatttatcattgataccgtcgaggccgttcgctttgttcccctggtgaagggggagctggcctgagacccggattattccaggttttttttgcctgactttaggcgtagggtggacacatttttcagtgtcctggccgggcgccgcccggtaagcaagatattggcagttaacatattcctgggggataaatgagcgcgggaagcaccaaatttaccgtcagccgtattgcggctctttcactggtttcactctggctggccgggtgtaccaacaccaataatccgcctgcgccggttagctctgccggcggcgccgcctcttccagcaccaactccggcatgctgattacgccgccaccctccggcgtcaagtccgctcctcaggcgcagccgattcagccgatgcagacccagaccattcagccgcagccggcgccggtggcgcaggagccggtacagacggtaaatggccggatcgtttacaaccgcaaatatggcgatattccgaaaggtagctataccggcggcagtacctatacggtaaaacgcggcgacacgctattctatatcgcctgggtcaccggcaacgatttccgcgacctggcgcaacgcaacaacatcccggccccgtacgcgctgaacgtggggcaggtactgcaggtcggtaacgcctcaggccagccgatcaccggcgaaaacgccgtttctcaggccagcgcaagagcgagcggcggtgcgacgaccagcacaacttctgcacaaaaatcgaccgcggtggttgcttcacaaccgactattacgtattctgaatcttcaggtgaacagagtgctaccaagatgttgcctaataataaaccagcgaccacaaccacaacggttgtcgcgccggtgacggcaccaacaacggtgagcacaacccagccgactgcaagcagtacgtcaaccagttcgccgatctcagcatggcgctggccgactgatggcaaggttatcgagaactttagcggcgcggaaggcggcaataaaggtatcgatattgcaggcagtaagggacaggctattgtcgcgaccgccgatgggcgcgtcgtctatgccggtaacgcactgcgcggctacggtaatcttattatcatcaaacacaacgatgattacctgagtgcctacgctcataacgataccatgctggttcgggagcaacaggaagtcaaagcggggcagaaaatcgctaccatgggtagcaccggaaccagctcaacaagattacattttgaaattcgttacaaggggaaatccgtcaacccgctgcagtacttaccgcagcgataatttggcaaagtacggataagcgaagcatcagctaacaggcgccagggcggtgtctacgttcctctcgcagagagggcaggggaaatcgtccaggcgtcgtttgttgatgtgccgtggaaggtgctttgctcagggatcacgggtaggagccacctttatgagtcagaatacgctgaaagttcatgatttaaatgaagacgcggaatttgatgagaacggaattgaggttttcgacgagaaagccttagtagaagaggaacccagtgatagcgatctggctgaggaagagctgctgtcgcaaggcgcaacccagcgcgtacttgacgccactcagctttatcttggagagattggttattccccactgctgaccgcggaagaggaagtctatttcgcgcgtcgcgcactgcgtggtgatgtcgcttcacgccgtcgcatgattgaaagtaacttgcgtctggtggtgaagattgcccgtcgttacagcaatcgtggtctggcgctgctggatctgattgaagaaggtaacctcggcctgatccgcgccgttgagaagtttgacccggaacgtgggttccgtttttcgacctacgcgacctggtggatccgccagactattgaacgggcgatcatgaaccaaacccgtacgatccgtttgccgatccatattgttaaagagctgaacgtttatctgcgtaccgcgcgcgagttgtcccataagctggaccacgagcctagcgcggaagagatcgccgaacagctggacaaaccggtcgatgacgtcagccgtatgctgcgtctgaacgagcgcatcacctccgtggatactccgctgggtggcgattcagaaaaagcgctgctggatattctggccgatgagaaagagaacggcccggaagacaccacgcaggacgatgatatgaagcaaagtatcgtcaaatggctgtttgaactgaacgccaagcagcgtgaagttctggcacgtcgttttggtctgctgggttatgaagctgccacgctggaggatgtgggccgtgaaattggcctgacccgcgaacgcgtgcggcagatccaggtggaaggtctgcgtcgcctgcgggaaattctgcagggacaggggctgaatatcgaagcgctcttccgcgaataagacgttttctgtcaaaaaggccccctcgaaagtcggggcctttttctttgggctagccgaggcgggtttcctgcagatggcgccagacgattttcccttccgcttgctgaaaaatcgccgtcgaccagcgaacgttctggctgctatccgccagcgtttggctttcacgatatagcactgcggcgccgtcgtgccactcgctgatgatttccatctgatccactacgatatctaaccccggacggctgccgccggcgtggtggaaaaaatggctcaccgttgggtagtccatcttctcaccgctcaaggggatcatggtaaaatcggcggcaaaacgcttcatcagcgcctcagcgcttccttcgccatggcttaaccagcgttcgataaggacatgggcatcgaggacttcctgcagataaggattcatgacttctccagagtggtgtgcaggcgatggataatcgcccgattattcagccgcaggcaaaacagcagcggcaacagggtaatgacggcggcgctgataaataccccctgccaggcgtaggccggcgggaataccctcagcagcagggcgagcagggcgctgccggcaaagaagctgagctggcggttaagattccatagcgcgctggcgtcaggcatctcttcggcaggcgtatgcaggaaagcgctgctttgcgcggtgctgctgcataagctgcctccgccgcccatcagcgtaaaggccagaatcaacagcgccagcgggctgtccgcatcgatcttcagcagcagcatgatccccatcgcctgaagcaggcagccgatgacgaccagcggccggggcccgaagcggttgaaatatctgccggtaaaggtgatggcggcaaacgaggccagcgaccagggcaccatcagggcaccgattgcccccggcgccatcccggtgacgcgttgcaggtagtacatccccaccacgttgacgccaataaacatccccggcacgcagaggtagatcagcatcgcgaagcgcagcaggggatcggccagcagcgacagtggaagaaagcgagtcgggcgaaccggaccgggggtgtcgttcagccatcgcaccgccagcacaaaggttagcagagcgacaggcaggctggcgaaaaagacccagcgccaactgaacgcctcgactaacaggccgccgatcgccggcgagcaggcgggggccagcaggccgaccagcatcaccgccgccgacagcttcgcccgctcatgcggctgaaacagcggccacgtcagcgcctggccgagggggattaacagcccgccgcccatcccctgcagcgtccgccataaaatcagttcgctcaggctgttggcaagccctgccgccagcgcgccgaggctgaacagccccagcgagagtaaaaacagccgtttcgccccccagcgctcgctgagccaggcgctgaacggcacaacgaccgtcagaccgagaatataggcattactgacccacgccagctgcgagacggaaaccgccagcgcgcggctgattgccggaaaggcgatgctggcgataaacatattgatcaaatcgagaaaaaagccgaacagaaaaacggtggcaacgcggtggcggtaggtcatggttcactccctcagacaggcggctactgtaaacctgccgcagcgagggataaacgggactaatcgggatatactgtctgaatatttttgacaatcatccggacgacgatgcttaatcttcagcgcgtgaccatgtttatcgccgtggtagatgccggcagtttcaccctggccgcagcggcgctggggcagaccaaggcggtggtcagctttaacgtacggcagctggaaaatgagctgggggtgacgctgctgctgcgttcgacgcggcgtttgcggctcactgacgccggggtgctgttctatcagcgcggggtggcgctcctgaacgcggcggaaaatctccaggatgaggtgcgggccagccatagcggcttaagcggggagctacggatcaccaccacgccggagtatggcgagcaggttatcattccagcgctggccgcgttcgcccgtcgtcatccggcgctgcgggtgcgccacgtctcctcctcccgtcatgccgacctcatttcagaacgatttgatgtggcgatacgcctcggtacgctggccgattcccgctatcgggcgacgcggatagccagtttcgcgatcctgcccgtcgcctctccggtctggctggcaagccatccggtgcagacgctgtccgatctggcgcaagctgagtggattattcacgagcgcctgccgacgccgctgcgctggcagctgcgcacggatcaccagacagaggtggatttcgcgatagccagcgcgccgcggttttctgctgatagcgctacggcgctgatgagctttgctctggcgggatgcggcgtcgccttgctgcccgcatggctggtagccaaaaaggtggcgcagcgggagctggtgccgctcctgccggaataccatttcccacagcagggtgtgtatgccctttatcccgactctcagcatttgccgacccgggtgcgggcatttattgacttcctgcgcgagaaggtcggttaagcgcccgttcagggcgccatcattttgtgcaccagccgggagaactgctcgcgctcgtcatcgctcaggcggccgagaaactcgtcatcgacctcattgccctgcggaatggaacggttaagcaacgcctcgccttcgtcggtcagatagacaaaacggcggcgtttatcggccggatcgtgctcccggcgcaccaggccgcgcgcttccattcggctgagcatctccgccagcgtagccttggtgctgaccgccgcttcaatcagcgccacctgttcgatcccggggtgctccgctaccgagcgcatcaccgcatactgaggtttagtcagctccggcaacgcctgctgccagcgggcggtatgctgttgaaaaagctggcgcagcaggtggaatgcttcgtttcgtaactccatgaatactccgtaacaaaactgtcacctctatgatagccgttcgtacgcctttttataccctttctgcgttttgattaaaaatgcgcacgtatacgaacgatcttgccaataagggctggagggggtagtttaaatataaagttcgtacacgaacaaaagtaatgaggtctggaatgaaactgattattgggatgacgggggccaccggggcaccgcttggggtggcattgctgcaggcgctgcgcgatatgccggaggtggaaacccatctggtgatgtcgaaatgggccaaaaccaccatcgagctggaaacgccctggacggcgcgcgaagtggccgcgctggcggacttttcccacagcccggcagaccaggccgccaccatctcatccggttcatttcgtaccgacggcatgatcgttattccctgcagtatgaaaacgcttgcaggcattcgcgcgggttatgccgaagggctggtgggccgcgcggcggacgtggtgctcaaagaggggcgcaagctggtgttggtcccgcgggaaatgccgctcagcacgatccatctggagaacatgctggcgctgtcccgcatgggcgtggcgatggtcccgccgatgccagcttactacaaccacccggagacggttgacgatatcaccaatcatatcgtcacccgggtgctggatcagtttggcctcgactatcacaaagcgcgccgctggaacggcttgcgcacggcagaacaatttgcacaggagatcgaataatggcttttgatgatttgcgcagctttttgcaggcgctggatgaccagggacaactgctgaaaatcagtgaagaggtgaacgctgagcccgatctggcggcggccgccaatgcgaccggacgcatcggcgacggtgccccggcgctgtggttcgataatattcgcggctttaacgacgctcgcgtgacgatgaacaccatcggctcgtggcagaaccatgccatctcgctgggcctgccgcctaacacgccggtgaaaaagcagattgatgagttcattcgccgctgggataacttcccggtgacgccagagcgccgcgccaacccggcgtgggcagaaaatactgttgatggcgatgatatcaacctgttcgatattctgccgctgttccgcctcaacgatggtgacggcggtttctacctcgataaagcctgtgtcgtttcacgcgatccgctggataaagataacttcggtaagcaaaacgtcggtatctaccgcatggaagtgaaaggcaagcgcaagctcggcctgcagccggtaccgatgcacgatatcgcgctgcatctgcacaaagcggaagagcgtggggaagatctgccgatcgccattaccctcggtaacgacccgattattaccctgatgggtgccacgccgctgaaatacgatcagtctgaatatgagatggctggcgcgctgcgcgagagcccgtatcccatcgctaccgcgccgctgaccggctttgacgtgccctggggttcggaagtgatcctcgaaggggtcattgaagggcgtaagcgtgagatcgaggggccgttcggtgaatttaccggtcactactccggcggtcgtaacatgacggtagtgcgtatcgacaaagtctcttatcgcagcaaaccgatttttgaatcgctctacctcggtatgccgtggaccgagattgactatctgatgggcccggcgacctgcgtaccgctgtatcagcagctgaaggccgaatttccggaagtgcaggcggtcaacgccatgtacacccatggtctgctggcgatcatctccaccaaaaaacgctacggcggttttgcccgcgcggtgggcctgcgggcgatgaccactccccacggcctcggctatgtgaagatggtgatcatggttgatgaagacgtcgacccgttcaacctgccgcaggtgatgtgggcgctctcctcgaaggttaacccggcgggagacctggtgcagttgccgaacatgtcggtccttgaacttgacccaggctccagcccggcaggcattaccgacaaactgattatcgacgccaccaccccggttgcgccggaccttcgcggccactacagccagccggtgcaggatctgccggaaaccaaagcctgggctgaaaaactgaccgctatgctggccaaccgtaaataaggagaagaagatgatttgtccacgttgcgccgatgaaaagattgaagtcatggcgacctcgccggtgaaaggggtctggaccgtgtatcagtgccagcactgtctttacacctggcgagataccgagccgctgcgccgcaccagccgcgaacactatccggaagcgttccgcatgacgcagaaagatatcgatgaggcgccgcaggtgccgcacgtaccgccgctattgccggaagataagcgttaatgaaaggggcccgctaagtcgggccttttttatatttagtacaattatggaaattattttttcattaaattaaaaaattacgtgaagggttaatataccgggatgactttgcgagcctgcatccagattattataaaattcgtctgattaattccttgcagataaatttcacgccctgacgagtgtagaattgcggcgggtgcttgaggctgtctggccttgagcattaccaggaccccagacagacgaaagccccaggagatatttctatcaactgaggctagcgaatgaacatagacaattcagatgttagtctcttctttgcagggaggcaaaatatgcccttgtggcaatcgtcgtactctttattacggtactgggatttacgctgttggtgcacagctcactatgcgagctgagtattaaagagcgtaatattgagtttaaagctgttctcgcttacgaatcgaagaagtagcatccgcgcgagggcaaccccgcgtatgggttgtcaggacgcatcctctagcacccattttttgtttactaaaacggcagcgcttcacagcgctgccgtttttcaccttaatgggtggctagaccaggcttttcagacggtagatccactccagcgcctgacgcggggtcagggagtccggatcaagattctccagcgcctcaaccgcaggcgagggctcttccggggcggcgagtagcgacatctgcgtgccgtcgacctgggtcgccgccgcgttgggcgagatactctccagctcgcgcagtttctgccgcgcgcgcttgatcacctctttcggcacccccgccagcgcggcgaccgccaggccatagctcttgctggccgcgccgtcctgcacgctgtgcataaaggcgatggtatcgccgtgctccagcgcgtcgaggtggacgttggcgacgccttccattttctccggcagctgggtgagctcgaagtagtgggtggcgaacagcgtcagcgccttgattttgttggccagattttccgcacaggcccacgccagcgatagcccgtcgtaggtggacgtgccgcggccaatctcatccatcagcaccaggctatgctcggtggcattgtgcaggatattggcggtttcagtcatctccaccataaaggtcgagcggccgctggccaggtcatccgccgcgccgacgcgggtgaagatgcgatcgatcgggccaatttctactttctgcgccgggacgtagctgccgatataggccagtagcgcaatcagcgcggtctggcgcatataggtacttttaccgcccatgttcggcccggtaatgatcagcatccgccgctgcggcgccagctgcagcgggttagcgataaacggctctttcagcacctgctcgaccaccggatggcggccttcgctaatgcgaatgcctggcttatcgctaaaggtcgggcagcagtagttcagggtttccgcacgttctgccaggttgaccagcacgtccagctcggccagcgcgctggcgctggtttgcagatcggcgagatgcggcagcagcaggtcgaacagttcgtcataaagctgtttttccagcgccagcgctttgcccttggaggtcagcaccttatcttcgtattccttcagctcaggaataatgtagcgttcggcgtttttcagcgtctggcggcgcacatagtggatcggcgcgaggtggctctggccgcggctgatctggatgtagtagccgtggacggcgttgtagccgactttcagggtatcgaggcccagccgctcgcgctcgcggatctccagcttatcgagataatcggtggcgccatcggccagcgcccgccactcgtccagctcttcgctatagcccggggcgatgaccccgccgtcgcggaccaacaccggcggggcgtcgatcaccgcgcgctccagcagttcgcgcagttcggtgaactcgcccattttctcgcgcaatttttgcaccggctgactgtcaacgtcggccaggagctcacgcagcagaggcagttgctgcagggcatgacgcatgcgggcaagatcgcgcggccgggcggtacgcagcgccagacgcgccagaatacgctccagatcgccgacctggcgcagcaccggctgcagctcggtatagcgctcctgcagcgcgccgatggtctgctggcgctccaccagcacggcggtatcgcggaccggcatatgcagccagcgcttgagcatccggctacccatcggcgtcaccgtacagtcgagtaccgaggccagggtgttgtcggtgccgccggccagattctgggtgatctcgaggttacggcgggtggcggcatccataatgatgctgtcctgctggcgttccatggtgatggagcggatgtgcggcagcgaggtacgctgggtgtctttgacatactgcagcaggcagccggcggcgcacaggccgcgcggggcgttttcgacgccgaagccgaccagatcgcgggtgccgaactgcaggtttagctgctggcgcgcggtgtcgatttcaaattcccacagcgggcgacggcgcagaccgcggcggccctcgatcagcgacgattcggcaaaatcttccgcatacagcagttccgccgggttggtgcgctgcagctctgccgccatggtttcgcggtcggccggttcgctcaggcgaaagcgcccggagctgatatccagcgtcgcgtagccgaagcccttgctgtcctgccagatggcggccagcaggttgtcctggcgctcctgcagcagcgcttcatcgctaatggtgcccggggtgacgatacgtaccactttacgctcgaccggccccttggtggtggccgggtcgccaatctgctcgcaaatggccaccgactcgccctgattgaccagtttggcgaggtagttctctacggcgtggtgggggatgccggccatcggaatgggttcgcccgcggaggcgccgcgcttggtcagcgagatatcgagcagctgcgaggcgcgtttcgcatcgtcataaaatagctcgtaaaaatcccccatccggtaaaacagcagaatgtcaggatgttgcgcctttagcttgagatactgctgcatcatcggcgtgtgggcgtcgagattgtcaattgtgctcatggggtgttatccagatccctgattttaaatggctgcgattttgtagttttcgtcgttatcacatggatgagacataataacggagatgggcaggtgagggaaaccgacgaaagcgcgcggcgcgatccggattccagttgcgccgcgcgggggttacggcgccagataaacctgggggaccgcgttgtccgggtgctggacgaggcggacatccgccccgtaccagcgatggataaccggctgctggatcacctcctgcggcgtgccctgggcgaccagatgtccctggtggagcagcaggatgcggtcggcccacagggcggcgaggttaaggtcatgcagcaccacgcagacgtgcagttgcccgccggcggtgagccgtttgagcaaacgcagcaggtgctgctgatagtaaaggtccagcgccgaggtgggctcatcgagaaacagccagccctgcggcgcgccgtcgcgccatagctgcgccagacagcgggccagctgtacccgctgctgctcgccgccggagaggccgggatagcggcgaccggcaaggccatcgcagccggtgacggccatcaccgccgccagcaccgccggatccgccgtcgcgccccacggtgagcgtcccatggcaatgaccgtttccaccgtccagtcggcctgcagggccgttcgctgcagcatgaccgcccgccggcgcgacagcgcctcgggggaccaggcctccagcggcttgcctgcaagatggcgggtgccgctgtccggagtcagatagccagtcaacaggcgcagcagagtggatttcccggcgccgttcggcccgataagcgccgtcatctcgccgccgcgcagcgcgacggagacgttgtcgataatctgtcgtttaccaaggtgaagtgacagcccctgggcgcagtattcattaaccatgtctggagttctcccgacgaaagaccagccacagaaaccagggggcgcccagcaggctggtgagcagaccgaccggtatctccgccggcgccgccacggtgcgggccagggtgtcggccagcagaagcaggatcgcgcctgccagcagcgagccggggatcagtccgcgatggtcaggtcccagccacaggcgcatcaggtgcggcaccaccaggccgataaagccgatgactccgctgatggccaccgcgacggccaccagcaccgcgctgcacagcagcagccagcgctgcagcgcctgcacgttgaccccaagatagtgcgcctcttcatcgccaagctgcagcagattgaggcgggacgccatccaccacaccgccagcgccgccgggataatcaaggtcgcggccaccagcagcgtcggccattcggcctggcccagactgcccattccccacagcgacagctggcgcagctgggcgtcattgctcagccaggacaggacgccgaccagcgcgccgcacagcgcgttgatggcgatccccaccagcagcaggcgcgacagcgaaccctcctccgcccgactgaggatgaaaatcaccaccatcaccgccaggctgccaataaacgccgccagcatcggcatatacagagcgatcagccccgcaggggagaacgggagcactagccagctggccaccgccagcgcggcgccgctgctgatgcccagcaggcccgggtcggcaagcgggttgcgaaacagcccctgcatcacgcagccggagagggccagcgccgcgcccaccagcagggccagcagcacccgcggcagacggatggtcagccagatatggcgcagcatgtcatccccggaaggcagcaggttgaccagcggcaagcgcatggcgccgagggtggtggcaaacaacgtcagggagaccagcagcagcgtcatcagcagcaaacggcgagcgagggcagggcgcatcagggcaactgctccgctttgtttcgcagcgcgattatcgcctgcggtgtgcgcggcccgaagcccagcagggccatatcgtcgatcgtcagcagctgtttatgacgccccgccggggtctgcgccaggccgggcagtttccacagcccggcttcgccgcccatccctttgagaccatcggcggagatcaccaccagatccgcctggctggcggcgaccccttcctgcgacatggcgcgatagtggtcgaagccctgcatcgcgttctgcaatccggcggcgcgaatggcgccatcggccgcggtatgctgtccggccaccagggtattcattccgccgtggctgagaataaacagcacccgcttagcaaccggctgcgttggaatggcggcgatctgctgctgaagctgctggcgcagcgcgtcgcctgccgccgttttgcctaacgcttcggcaatgacggccactttgttatcgatcgcggacagactttcgccgcccggcacgttcaccaccttcaccccgctcgcctgcactttgtgtaagaccagcgagggctgcgcctgggcgctcgctaacaccagctgcgggcgtaacgcgaggatcccctcggcgttcagctgtcgcaggtagccgacgtccggcaacttttgcgccgccgggggccagctgctggtgctgtcccgcgccaccaggctctcctccgcgtgaagggcataaacgatctcagtgacatctccgccgagtgtgacgagccgctcaacggcggcgtgactcagcagcgggaaagcgatcaagagcagtaaccagcgcatcatgcgggctgcccttcacgggtcaggcggtctacctgctggcgccattgcgtctgctcggggtgcccctcgctgcgctggccgtagagctgggcaatctgggtgccgtctttagcgaacagttcgacgctggtgacgtgtccgtccgaagtcggcttgcgggtcacccacacttcatcgaggctctcttcgcgcagatgcagggtaaaagtagtattgaagatattcagccagccgcgcatgggggccagcttttccagggcgccggtaaagatctgcacgcagccgcgattgccgacgaaaatcatgatttcattgccctcctggcgcaccgtctccagcagcgacggcagcgcatggcgatccacgcggcaggcgaggtcgtcgctcaccagacggaaggcctgctggcgggaaagctgatatttacgcagcagaccgaagaactggtgaacgtcggtcatcgcgcgccagtcgttctccagggcggcgccgtcggcggtatcggcatatttcaccggctccagcgggcgcagggtcagcggtgccggcgccgccacccgatattccgcgatcagggtctcccaggccgccatgtcggtctgcgtggtcgcatagactttcagcagggcgtcgccgtggtggtcgaaaaactggatgctctgacggccattatcgttcagatggaaggcgctggcccactggctgaggaacagacgcaggtcgagcgcgcgcggggtcagcaccagcccggcgtggccgctgaggtgctggtgcgtgaactggcccacctgctcatgcacggcatactcgttgcggcagatgcatttggtttcgccgacgcgctccagggcggcaatcagcgcccgggcgtcatcgctcaggcgcacggcatcatgaccgaggcgggcggcggtcagctcggcttcgctgatccccatttccgcggcgatatcgcgggcatatttcgcggtactggccgctttggtggcctggtagcgctgccacaggtcagggtgtgcatttggcataatcatatccttctcgacgatgaatatccccggccggcgggccgggggcaggtgcgttattattcgggcaatcagaagtcgacgttgacgcccagctgccaagtgcggcccggcatcaccgccagcgctttatcgttggcgtcctggttggtgccggtctcgatattgcggctgctcaggtaatcccagtatttacgatcggtgaggttgtagaccccgccattgaggcgcacgtttttcgccacctgccagtacgtggtccagtccagcatgccgtagcccggcacgcgcatatagtcgctgctggcatcggtgatggcggatccgctgttgctgtagctttcgcggttggtggcggtcgcctgtttccctttgacaaaggtcgccgtcagggcggtgccgtagcgtttcgccggatcgtcccacgccacgccgacgatggctttcattggcgccacgctgtcgaggtcgacgtatttatcgccgctgtagctggatttcgatttcccttcgctatagccgagggcgagggtggcgctcaggccgtccacctgctcaaaccaggtgccaaagttaaatttggtgctaatctcaccgccgtagatataggctttatcgcggttttccgcctgataaatggtgtagatgttcgacggcacattcgtgaactggcccggattgttggcgcgggtatagcgggtataggcgataaagttcttatagctgttgtagaacagcgccgtgcgcagggtgatgccttcggtaacttcccctttcagcccccactcgagattatcgctggtttccgtcttcagatcggtattgccgatcagggcatactgctggctgccggcgtagctggagccgaggttccaggagccatacagctggctggcgttggggaactgcgccccgcgctggtactgcaggtaggtcatcaggcgcggggtgaggtcgtactggaaggtcaacgacggcagaacctgggtatcgctgtttttgccgtacagattcgccaccgacgattcgctcagcacgctgctgttggcggcgagatcggacagattttccggcttagtcgattgatgcaccacgcgcacgccgggaataacggcgaagttgtggctgtcgagatcgaagttgatcttatcctggacaaagccgccgagggtgtagctgcggctgtctgcctccggctgcatgatctcgctgtaaacgctggggatcggcgactggctgaacggccgctgggttttgctggtgctggcgttgaaaccggcgctcagatcgtggcggcccagggttttcgccagcgcggtctgcaggccccaggtgtcggtatcgtagttagagttcaccgtctgcattttgcgggtgacgctgtccggcatataagtccagtcatgggcttcggtatgctggtagtagatttttgtggagacgctgtcgaggtagtcgttcatcggcgtccagtcatccttcaggctcaggccccagcgccgggtctggctggtctggttggcggtgccgatggtgctgttgccgctggagtcccaggtatcgtagtgggtgtggttggttttatggtaatagtcgaaggtgctggtcagcttgtgctcatcgttaggctgccagatcccggaggccagaaaagcatcggagtgccagttcgccgggtaggcgtcgacggtgccgctgttgttttcggtttcctggccgtcacggcggctatagaccaaaatcccgcgcaggaactcatcgccgccggcgacggtcaccccgttgtgccagctgcgatccgcagagtcgtaaccgctgcggtagccgaaggcgctggtcttgcccgggcgcaggtaatcatccgctgatttcgggcggaaggagacattccccccgatagcgctgttggccgtttccgtcgaggtggcgccggactggatatccacgctgccgtacatatacgggtcgatataatcgcggccgatgccgaaggtgttgagcccggcgcggccgacgtagccgcggccggtggcgttgggttgcgcgataccgtccacgtcgatgcctacgcggttgctctccataccgcgaatgttgtagccggtgtaacctccgcggtcgaagccgcttttgccgttgccggagccgccgctggccccggtggcgctgatgagcggctcatagcgcatgattgagccgaaatcgttagcgcctttattctccagctcccgggcgctgatgctgtgttcgctaccggctttctgcaccggcgcgggggcggtgacggtcatttgttccgaggtgtcatccaccgcctcgccgctaacggcggaagtatctgctgcgatggcagaagtctgataaattgctgcaaacaaagaggtcaccagcaggcgttttttacaccatgctgctgacggagtcgatttgtacatagtcgccacgccttgatcgttattagtatcggctcacgcgttacttccagagatgcaggttgctccgtcttttccgttgcggatggggtcttactccatttgttgattgcgaatggtaatgataggtattatcgtttgcaacaaaataatcatgtgttcttcatttaaactgcactttgtttacaatttgccctttcagacttagcgagacgacgatgaactcaaaagcggccatcaccatcacctactgttcccagtgcaactggatgctgcgcgccagctggatggcgcaggagctgttatataccttcagcaccgacatcgcctcggtgacgctggtgccggggaccggcgggatcttcacgatcgatgtcgacggtcagcagatctgggagcgcaagcaggatggcggttttccggatgcggccgagctgaaacgccgggtgcgcgatgtctgcttcccggagaagccgctgggccatgtggataaaggtgaccagaaggggtgacaaccccctccggacgacaagcgcccggaggagaagccgttagtgggctaactgcacgtcaaccagcacgctttgtcggcgagtgtgtatgagggataccgcttcttccagcacgccggggagatcttcggcccgggaaaccgacagggccgccgcgcggctggaggcggcgatcgcggcgaaatccggcgaggtggtaaaggcggtggccggaatggtttccgcgcgggccgcgtagccgtccgggtagagcgctttggtgccgcccgcgacggcgccccatccgccgttatttccgaccacgacgaggacaggaagcttcattacctccgcaatatggtggcagaccgcagggttggcgaacaggtacgacccgtcgccgacggcggcaataatcagctcttcccggcgcgcaagctgcagccccagcgcgatgggcagggcttcgcccaggccgccggccagcgcttcctggtaatagctctcggcatgggtcagtccggcaaactgcggcagcgtggtcagttcagaaacgatccggccgcggtgttgattagccagatggccgaggcagtagctgagccagggtttggtaatggccccggtctggctggcatggagaagcgcgtcgcgctggtttttctgttgctggatgcggctctgcgtatatgccgcccgctccgccacatgctgctggcgggcggcctgcagcgggcgcagcgcctcttccagcaggctgaagacttcatcggtctcgcccgccaggttgatgtccgcgcgatagccgcgcaccgggtagcgggagaagagcggatcgggccccatctggatcacggtgcagtcctggcgacagtcgccctcggcgatcatccatggtgcctgcgagtcgaccaccagaatcacatcggcgtcagcgagccagacgctgggatcagccccggcgagcaggggattatcggcgctcagggtaacctcggtgccccagtattccaccagagggatcgcccattcgcgcaccagactatcgaggcgcgcaaagccttccgccgttcgggcgccgcgctgggcgaagatgaccgggtgtctggcgcaggcgattgcctcggctgcgcgggcgatatcttccctgactggcgcatagcggaccggctgctgcgaagggccagcctgcagcgcggcctcatcgacggcaaaggtttcgcacagtggctcacgcggtaagctcaggtagaccggccctttcggcagggagctggcgatcgcccaggcccggtcaacatgctcgccgatctgatcggccagccgcagttcaaaatcccacttcacggattcgcggatcagcgccgcctggtcgcgcatctcctggccgtagccaatcggcgtattacggcagccgaagtgggaatgttcgcttatcggcgtgcggccgccaaaaatcagcaccggaatattgctgttcgccagattgatgacgccgcaggcggcgttggctagcccgacgttggtgtgaaccatcaccgcctgcaccttgccggtgccgaggtaatagccatgggccatgccgatggcggcgttttcatgcgggcagatcactaactccggtaccttttgcccggtcgcccgggcctttgcccaggcttcaatgactggaggataatcggtgcccgagttgataaaaatatacgccacgtccagcgcctgtagccgatgcagtaaaagttcagcagccgataatgtgatagaggccatattctctccgtattcacgcggtgtaatcgcggtaattaaaaggttaagaaaataaatccgcccatcgtaatgatggaggcaataatactcagcgccatcgtcgaggccatttcctgctcgccggttttatactgcatagcaataattatcgcgatggagcctaccgggatagccatcgtcaatacgacttcctttatttgctccatgctgaagcccatttttaataaaatgagatagcaggcgccggggaccagaatattgcgggcgataacggtgataatggtagcggtggtgataacaatgctgcgcgtatagagcacgatcccggcggcaaacagcgccagcccgccagaggctttgcccagcagacccagcgacatcgagatagtctgcggaatatggatatccgccagcacgatgatcagggcgattaccggcgaccagaccacgggttgtttaatggcgttcaccacccgtgcgccaaaggaaatatgctggctcttatcgccggtggcgaccgacatcagtatcatcaccagcggcagctggaagacgttttgcgtgatgctggacacggtgatcagcgacgcgctgacggtgccaaataaaaaggccagcactgaggtgccgataaacgggactgccggcgagccgatggccagcgcctgcagcgtactgagggcgaggtcgcgtcgaaacagatagcgggcgaccagtaagggaatgacgaagctgagaatcagcgccaggatgatagccacggcgaccgggcccatggtcatgacgatgtgtcgcggcgtcatcaccatattgctgaaaatacttagcggcaatgcgtagagcatcacaattttattgatgtctcctgcctgctgccagttaaagtcttttcgtttaccgctaatatagccgatgatgacggtaatgatgaccggtaatatagcgcctgaaattaatagaatattgttctgtgtcatggtgatatattctcattataaattatcttcggttcaaaaatgtgttttgccgtgggtggtgagataaataaatccttttgaagtatgcgttccggtgatttttgagcgtattgatagcgatatttattcgctaaaaaagggcgcaggggaaatgcaaaaaccgtttattcaatgagtaaatatcatgccaatgaaatttaagcagattcaggcatttattaccgtcgcccgcgaaggcaatatgaccctggccgcagagaaaatggggatcacccagtcgggactgagccgactgctattgagcctggaagcggacctgagcgcatccttattcgaacgacataagcacggcatggcgttgagcgaatatggcagcgcctttttaccctacgcgctgacgatgctgaataccgaacaaaaggcgcgcgaggaaattgagctcatccgtggcgccgggaaaggcattctgcggattggctgcgtttccagtctgctgaccagccatttcatcgataagctggcggctttccatcagcaccatccccagatccatctgcggatcgtcgaccgcattgactccgagctgtataagctgttgctgatgcacgacatcgatatcgccctctgcggtcccttaccgcatgatgagaaaatcgtggtgcggggcaaaattaactggcaggaccggatctgcatcgtcgccaggcagcaccacccgctgcatcaggcggcggacgtcaccctggaggcgatgctggactatccgtggattatgccgccgccgtctagtacgccaatgaacatcctggcggatatctttcgcgcccggcagctaccctgtccgcagccggttattgagtgcgcctcatcctcggccattaaggcctttctgtgcgagagcgatctgttaacgtcgatgccggccccggtttaccgacacgaagaagcgcttggcctgctgcgcccgtttgagctcgagggcagcgtttttatccgggatttctatgcctacagccatttcggggttctgtccggggcagccctgcagttgattcagcatctgaagcagtgagtctggtcgggtatggatattaaggtgtatgataaatacaccttaagagcagacgaaaggcggggagatggggaagcgtatcgaacgggaaaaaatgacgattcagcggatgattgccctctaccagcggcgcagtcccgacgcgcaggccgataatgcgcactatcaggcgctgaacgcctacgctgacaagcgccttgataagtgcgtgtttggcgagaacaaaccggcctgcaagcagtgtccggtgcattgctaccagccggcgaagcgcgaggagatgaagcagattatgcgctgggccgggccgcggatgctctggcgccacccgatcctcactgttcgccatctgctggacgacaggcgcccggtgccgccgctgccggaaaaatatcgaccgaaaaagtagcggctttccctggtcagcgctgcgcagccgggcgacaagtcgtgctcttgtagccccggcaaggcgttagccgccaccggggataattgctgaagttttctgtttctgactatcgcggatcgtgcttgcgacaaaggcgaccacaaacagcgcggtaaacagcactacgatagtcggcgctggcgcgctgtcgagatagaacgccagccacacccctcccgccgagcagccgatggccaccgctaccgccagcagcagggcgtggataaagcgtctcaccagcagaagcgcgatcgccccgggggcaatcagcagcgaaatcgacagaataatccccaccgactgcagcgtcgcgacgatggtcagggcgatcatgcacagcaggccgtagtgcagcagtccgccgcgcaggccgctggctttagcctgcgttggatcgaaggcgtgcagcaaaaaatcccgccatttgagaccgataataaacgcaatcaccagtgcgatcgccgtcgtttgcccaatatcgctgagggagatccccagcatatcgccgaacaggatatggtcgagatgaacatcggactggatcgctacgtacagcaccagtccggcgccaaacatgccggagaagacaatccccatgatggtatcgcgcttgagtcggctgttatcgtcgagaaaaccggtcgtcacggcgcacagcagaccagcgataaacgcgccgatggcgaaggggatgccgataatgtaggccagcaccacgcccggaaagaccgcgtggctcatggcgtcgcccatcagcgcccagcctttgagcaccagaaacaccgacagcagcgcgcagggaatggcgacgacgatcgatatcgctatcgcattgaccataaaaggaaactggaacggggcctggaacaggttcagcatgcggcctccctggcgcggcggcggctggccagcaggccgtgcttcggcgcgaagataaaggtgatgaggaacagcagcgtttgcgcgaccacgataatgccgccggtggcgccgtcgagatagtagctgagccaggcgccgaagaaactggtcaggctgccgatagccacggcgatggccagcaggcgcgggaagcgatcggttaacagccacgcggtggccccgggagtgaccaccaggcagatgaccagaaaggcgccgacggtctgcagcgccgccacggtgcaggcggccagcagggtaaagaacagcagcttcaggccgcgggtgttcaggccaatcgagcgggcgtggtgttcatcaaagaaggtcaccatcaggtctttccacttcagcagcagaatcgccattgagataaagccgatcgctgccagctggataatatcctccggggcgatggccagaatattgccgaggatgatggtctggatattcaccgacgtcggattcagcgacaccataaacagcccgatcccgaagaaggaggagaagatcagcccgataatggcatcctcttttagccgcgagcgctgttgcaaaaacagcatgctgcccgccgccaggccgccggagagaaacgcgccgagcgcgaaaggcaggccgagcatataggccccggcgacgccgggcacaatcgagtgggagagggcgtcgccaatcagcgaccagcctttgagcatcaggtagcaggagagaaacgcacagacgccgcccaccagcgccgacacccacatcgcattgagcatatagtaatagccaaacggctccagcagccagctcatcgtgggcctcccgccgcgcgccggctgataaacggccgctcgtcatcggtgataacctgcgcttccccgcctgtgagcgcgacgtggcgcagcacgccgctgaaagcccgctccagattctcggcagtgaaggtggtttctgtcgggccgctggccagcacggtgcctttcaccatcaccgtataatcacaaaattcactcactgacccgaggttgtgggtggagaccagcatggtacagccctcatcgcggagctcgcgcagcaggctgatgatccgcgcttcggtctgcacatcgacgccggtgaaaggttcatccagcaggatcacctgaccctgctgagcgatggcgcgggcaagaaagacgcgctttttctgcccgccggagagctcgccaatctgccgatggcggaactcgctcatgcccacgcgggccagcgcggcatcgacaatctcgcgatcgcgcggctttgcccgccgcagccagcccatatggccgtagcggcccatcatcaccacatcctccaccagcaccgggaaggaccagtccacctcttccgactgcgggacataggcgaccaggttctggcgcagcgcgcggttgaccggctggccgagtatggcgatctcgccgtgaccaacgcggacaaagcccatcagcgctttaaacagcgtggatttacccgagccgttaacccccaccaacgcggcaatggagccgcgcggcacgctgaacgaggcgtcgcgcagggcagtgtggccgttgcgccaggtgacggtgagctggttgacatacagtcccgcttgcgctgcattcatggctgcttcctcatcccgtcctggataccgttgacgatggtttcggtggtgacgcgcagcaggtcgagccaggtcggcaccgggccgtcggcggcgctcagcgaatcgacatacagcacgccgccgtagtgggccccggcttcccgcgccacctgacgcgccggtttatcggagatggtgctttcgctgaagatggtcgggatgcgttctttcttcatggtgtcgataaccttgcgcacctgttgcggggtgccctgctggtcggcattgatcggccacagatacagttcgcgcaggccatagtcgcgggccagataggagaaggctccctcgctggtgaccagccagcgcttatccgccggcagctgcgccagtctggcctgcagcggcgccatcgtctgacggatcttctctttgtaggcctcggcgttacggcgataggtgtcggcgtgaggcggatcgtacttcaccagcgcatcgcgaatgttatcgacatagatcagggcgttatctgccgacatccaggcatggggattgggcttcccgctataggggcccgcgctgatgcccatcggctggatcccctcgctgaccaccacctccggaacgccctgtaagtgctgataaaaacgggcaaaccaccgttcgagattaagcccattgctgaggatcagctgcgccccctgcgcgcgtttgatatcgccgggcgtgggctggtaatcatggatctccgcgcccggtttagtaatggagctcacgtcggcggcgtcgccggccacgttctgcgccatatcggcgataaccgtgaaggtggtgataaccctgaatttctcctgcgccgaggccggcgtcgcggccagcagagccagcgcgctggccagcagcaatgatttcagcggtgtcaggtgtagcataggatccctcgcaatggtgtggttaatttcccagcgtttatagccattgctatgttatatagcacaagctatttataaatgaaaataattcttatttgcatgcgtgggtaataatgagccgggaaacgaaagcgcgaaaaggggaggtaagtctggcccggcgccaaccgggcgaagatcaagagatatcggcgaccgactggcgcgggatcaggcggccagccagcgagcggccctcggtggcgaaggttggccggtcgtcaatcaggctgcgaatacgctgaatacagttatccagcagcgcctccagtggccaggagatgcaggtcagcggcgggtagagcagcgaggcgagcggggaatcctcaaggctcagcagggagacctcctgcgggacggcgatggtgaattcgcgcagcagacgcatcgcctcagccgcgtagcggtcgcgtttaacgataatgactgagtatttactgaagctgttaattaaggtcagcagcgcctgctcgacgtcatcgttggccgtcagcaccagctgacggttaaaaggaatggagtagttctgcaggacgttgcggtagccttccagcatctgacggctggcatcgtcgctatcgctgtccaccagcagggcgatgttgcggtgtcccttgccaatcacatagcggcaggcgctttcggtggcaaaggcgaagtcatagccctggctgttgctcccggcgacgccgaagcggtcaaaggcgataacgttgcgcggcgcgtcggcggcaacggcgcccagcaccaccaccgccacgcactggcgctgcagatcgtcgattaccgccgcctgctctaccgggtcgctgacgtactggaccagcaggcttttattcagccctttcagcgcctgagagagcagcggcagcagacgtgcgccgtggctttcgtcctgcgcggaaatcaccagaccaacgtggctggatgtctgactggcgaggttttgcgcggcaaagctcgggcgatagttgagttcttcaacggcccgcagcacagcttcccggctctcttcgcgcacgccccgggtgccggtcagcacgcgggataccgtcgctcttgagacattcgctaatcttgaaacatcatcaatcgttggcatggctttttctgtctgaacattttcgcctagcttaacatacctgctgaaaaaagtgtctaccgctgcccttgcgcggcgccgggaagccggggcagccaggccgcgccgcgcacgccgctggcgtcgccgaaacgggccggtttgatctgcgtgcggcaggtgtcggagaagatccacggcacgatggcggcaggcagatcgcgatagatctggctgacgttggacagaccgccgcccagcacaagcacctgcgggtcgagaatattgatcaccgacgccaggctgcgggcaaaggcatcgataaagtgtcgccagtgggccagcgcgcgcggatcgccgttttgcgccgcggcgacaatggcttccgcacgggcttgttccccatagcggcgggcgaagccggtactggagagaaagctttcgatgcagttcgttttgccgcagtagcagggctgcggcgggccatcgcgctcaggagtatagcccggcagcggattatgcccccactccccggcgatagcgttggggccgctgagcagctgttgatgaacggcgatcccgccgccgcagccggtaccgataatcaccccgaagacggtggtagctccggcgccggcgccatccaccgcctccgaaagagtgaagcagtcggcatcgtttgccatccacaccggctggccaagctgctgcatgatatcccggcgcagatcgtgaccgttgagcaccaggcagttgcagtttttaatgcgtccgctttgcggatcgatagccccgggcaggccgatccccagggtgaacggctgcgggctgaccgcgcgaatatcggcaatcagggtcagcagctgacgcataaaggcgtcatagctctctttgtgggtcggccggcgcaggcgctggacgcattcgcccgccgggtccagcagtacggcttccattttggtgccgccaatatctattccaagatgtaacatagtgacctcggggaatcaggcccggccagcgcgtctggccgggcaaggcgctaggcgtgaagcggctgcgcgcggtaaatcgcaatcagttcggcaatcagctctttcgccagaatggatgtcatcaggtgatcctgagcatggaccattaccagcgtcattttggtttttccctcgccttcgtcagcttcgataagctgggtctgtacaaggtgagcttcgcgggaatagtgcgccgcttcctgcattttggcgtcggcggtggcgaaatcacccgctttagcggcgtgcagcgcttcgtagcacaggctacgtgactggccggcgttgatgatgatccccatcacctgttcttctaattccatgattatcctctgaatcgttagcgttaagcggtttgcgccgcgttgtcagcctggccgacggcgttttcacgctcctgggccagcagctgtttttcgtaagctttgagaaatggcaggtacatcaccatggcggtagccatacaaatgaggcacaggatcaccgggctaaagctccagttcgccgcccacgaggcgccgataggcgccggcgttgtccacggcgtcatcgacactacgcggctgaccaggtccagcttcagcgcgaagtacgccagggtcgcgttcaccatcggcaccagcacgaacggcaggaaaaacagcgggttcatgatgatcggcgcgccgaacagaatcggttcgttgatgttaaatacgcccggcacgacccccatccggccgatcgtccgcagatgcacggccttgctgcgcagcagcatcagcgccagcggcagggtggagccgacgccgccgatcagcagatagtgatcccagaagccctggacatagatgtgcgggatagcggtgccagcggccatggccgcctgattgaccgacaggttggccatccagaacgggttcatgatcccggtgacgatcagcgcgccgtggatcccggcgaaccacagcacctgacagaccagcaccgacagcaggatcgccggcagcgtatcggaagccgcgaccagcggcttcaccagcgacatgatcgcttccggaatgatcatccccagctgggcttcgataaacaggttcagcggatgcagcgtcagaatgatcgccagcaccgggatcaggatttcaaacgagcgcgccaccccggcaggcacttccggcggcaggcgaatggtgatgttatgccgtttgaggaaggcgtacagctcggtggaatagatggccaccagaatggcggtaaagatcccctgaccggagaagtaggcagtagagatctggccatctttcagcggcgcggctaccagcagaaacgacatcagcgacagcatcccggcggtcagcgagtccagatgatggtgtttggcgaggctggcggcgatcccgacggcgataaacagggtcatcacccccatgctgaagttgaacggcagcatcagcgcatcgcgatgatcgagcgaaaattgcagccaggcgcgggcaaacccccacgtcgtatccggagaaaacggcgggaagataaacaccaacaggaacgagccgacgatcataaagggcagggcagtgataaagccatcgcggatcgaggtgacatatttttgctggccgatcgcgccggccataggcgtgatctgccgttcgatcacgtcgatcagtttagcgtacagagagctcatgatctttccttagttcttgttttcgataagggaaagggcgaaatcaaggaccgcggcgcctttttgcatgccgtagtccatcatattgatgggttcgacgcggataccgtatttatccgcctgtttttgcaggtcctgctgcatgtatttcacctgcggccccagcagcaccacctgataatggccgacctgttcggcaaactccgctacgccataggcgttgatctctaccggcaggccccgctgttcggcttccgcaatcatttttttcatcagcaggctggtggacatgcctgccgaacaacacaacataatttttttcataattaccgctcctgatgaggttggatgagcggactatagtcaaaatggatgcattacggaaagcgctttccgtttgtggatttattaattgtgaccatgatcacctatggcaggctttcactttccggtgttgtgggcgatcatcccggcgagacaaccattcgcaaaggtaggagtatgaacattcagttaatgaatgtggccgtggacatcatcgagcagcggctggcgccgctggcgaacgttctgacgcgcaacaaccacattacggcgatgcgcgatagctttgcgctggctatgccctttgtgattgttggcagcctgttagttcccattttgtttccgcccgtttccatcgacggcgcctcgcgtttcggccaggtctatttgctgctgcggcctatcctgctgccgacctttcagctaactattggcctggtggcgctgattgtcgccttcggcgccagcgccagtctcgccaagcagtaccgtctgccggaacggctctgcggtttaaccgggtgtctggcttttctgctgtttatcggctttcgcgagactgcggtgagcaatgtttatctcggcggtatggggatatttaccgccctgatatccagcacctattccattgagataattcgctttttctacaaaaaaggctggtgcattcgcttgcctgatgaagtgccgctgatgacccgcaatggctttcaactgctgatcccgctgctggtggtgatgctgtcgataagcgtgatgaatgccatactgctgcagaccaccggacgcatcgtaccggagttgatcagcgaagcggtgcggccgctggtgctggcgtccgacacgctgatggcggtacttatctctttatttatctgtaacttactctggtttatcggtatccacggcgcgctgatcatcaccgggatcatgaaccccttctggatgacctatctgtttgaaaatcagcaggcgctggcggcgggttcgccaacgctgccgcatatttatctgcaggggttctgggatttttacctgctgatcggcggtattggctccactttgccgctggtgctgatggcgatgcgcagccgctcgcggcagctgaaaagcgtggccaagattggcctgctgccgtcgctgtttaatatcaacgagccaatactgtttggttttccggtgatcatgaacccggtttttttactgccgtttctctttgttccgctgataaatgcctgtatcgcatggtatttaactcagctgggtatcctcgaccgcgcggtggcgatgctgccatggtcgatgccttccccgctgggggcggcatggtcggcgaacggcagctggaaaaatttgtgcatgagcctgttcgcgatgtttaacgcctggatgctctatcgccccttcttcaaagtgtacgaacgccagctcgcggaaaccgaacgctgaccccctcgccgtcggcggcttatcccccggcggcacctgctcatctcctcctccttccgctccactgccggctcccggcggcattcttgtaattttatgtgatcagtctcacgaatatattcgccgcagagctaattttgtgaaccagataggcaattatggaaagcgctttccgtaagtggatgtacatttccgtttttgatccgtaaatttcccctccgttatcggttcgtgttaacaaacataacgtgggaaaaaaataatgataaagctgaaacactcaatacctctggctctcctctcgctggcaggggccagcagcccggcctgcgccgatccgaagtatgattttgcgctgcatggctatatccgctccgggatcctggcgaactccgatggcaaccgcgcggactccgtcggcctgatgccggacggtaagtggcgactgggcaacgaagaagacaccaagatcgaactgatccccaccgtgacgctgacggcggacagcggcgtggtggcgaaagtgcaggccaacctcactcaccagtcgaaatgcacctccgactggaactgtcaggatgacgatggccatgacgtacagtttcgtgaagggttcgccgagctgagcaatctggattttgcgccggagatgaccttctgggccggtaagcgctacagcagctccaacacctccagccatcagttcgactgggagtacattcagtacaacggcaccggcggcggcttcgataacatggatctcggcttcgcccgcttcgacgccggggtgtacgccttttcacccaccgatgaaaccaaagcctacccggtggataagggagatcagggctacccggatgactattccctcaacctgtggctgaaaaagatcgcggggacaggcttcgatctggagctgatcggccaccacatgaaccgtaacgaaaaccatccgacttccgccgagaagggctatggcgtgaccggtatttataactttgacggcttctatggtctgaccggaggctactcccgcctcgcattgcagtacgggaaagggctggcggcgggtgactcgctgggtaaaaacggctggggctgggccaacctggaaaacacccagtcctggcgagtggtgctggatagcgtggcctcgatgggcgacctggagatctcgaccttcgctttctggcaaaaagataaaaactaccgctggtggacggaagatgaaaatggctggggacgctcgatgtgggtcgctggtatccgcccttatcatcagatcacccgcaactttgccatgcagtacgagctgggctacgaatacctggatgacaaaaactacaaaggagtaaacggcaaaggcaaaggcggcctgaccaaagtcaccgttgcgccaacgctgacctttgactccggtttctgggcgcgtccgcagctgcgcttcttcgtcacctacgcgaagtgggataaaggtgtctccgatgcattagacggtaactacaactgggataccaataccatcaccgccggcgggtattcccgcagtggctctaccgacaccgttaacttcggcgtacaggccgaggtctggttctaaggagagacaacgatgaagccgatgaaaaacctgctgctgatggggctgctgtccgcgctgggggccggcggggcgctggccgccgagcgctcgcactttacgcactttatcactcgcgacggcgccaccctcaaggacggcgacaaggtgtttcgtttcgccgggatccacgcgccggagctacaccgcattgaagacgacgcccgcggcccctgcagggcagatccgcgcggctgggggcaatactttaaatggccaacggcccaggagcagcaaaactggatccaggcgatggtgcaaaccggggcgaaagcccagcgcgtctacgtgctgtcggtgcagcaggaatttgataaggcctgcgggcgtgagacccatattctggcgccggaaacggcggacggcatgccgcggctgaatgagaaagccatgcgggtgtatgacaacatgattgccgaagcggataaacagggattgcgtctgatcctgccgtttatcgaccactggtggtggtggggcgggcgcgagcagctggcggcgttctatcatgaaaaagcggaagacttttatcggaccgatagcaagaccttcaaagcctatctggatgtgatccgccaggttatcacccggacaaataccgtcaccggccgcgcctattatgatgaaaaggcgatcatggcctgggaaaccggtaacgagctggaggataccaacgccgatttcctgcatcagaccgcggcgtggattaaaaaatgggcccctcatcagctggtggtggatggcacctataagaaaattaatccgtttgcgttgaccgaccccaatgtggatatcgtcagcaatcactattacaccaatgccgataataaccatcccgggcaggtgacgcaggatctgcgcgccgtcggcggacaaaaagtctatctcgtcggcgagtttggcctgctgccggcggatcaactgaacgccattatgcagtcgattgttcacagcgacgtcaacggggcgcaagctgccggcgggcttatctggggcttccgcggccatcgtcacgacggcggcttctactggcataaggagtcgaccgggcactatagctaccacctgccggggtttgccaaagaaggcgaagcgaaccaggagcaggcggtggtcgatctggtgcgcaccgccgcggcgcagatggccgggcagcagacgatggcaccgctgccgaagccggacgcgcctttgctgcgcgaaaccacctcgcccttcgcgatcaactggatgggcgctgcggtaggacgcagctacgatgtcgaacgcgccgcctcaccgaccgggccgtggacggtggtgggccgggatatctccgatggcgttaacgaatggaatccggaaaccatggttctgttccgcgacgattatcgtcagcttcagctcgggcacacgtattactaccgggtgacggcgaaaaacgagagtggtcgttcggccccttccaatgtgattagcgtgcagcatagcgaggagaatcagccaccggttgtcacgctggaaccggccctaaccaccacgcaggaccagggcgtcgagcttacggccagctggcaggacgatggcctgccgtcgcgagaggttaaggtgggctggcagcacgccggcgatggccaggtgcatttctgccatgccgatcgggctcaaaaccgggcctggtttacggcgccaggcacctatgcgctgacgttcacggcggacgatgggctgttgaaaagcagcaaaaccgtgaccgtgacggtgggcgaggcgacggggaaagcgccagcggatttttgtcgttatcacggcgaagtttatggcgtggctgaggggcggctgacggtgatgaagagtgataaagacgcgctgacagttggtgaggacggcttcctcggcccatttgccaacgagggggataaggtcagctggcaggtgcaggcgccgtggagcggtcagttcctgctcaatgtaaccttcaacggcaaatggggcggtaagcagaactcgtttgtcgtcaacgggggcgctcggcaggcggtggccttcccgcagacggatgagcagggccagcagctgcggataccggtgacgcttaaagccgggagcaatcagattgacttcggccgcttcgccggcgactggggctatatgttcattaaatcgatcgaagtggtcgctgagtagtacgttcaggctgcgccagacgggcgcagccttttttcgaaggagaggttatgcagcagtatcagtttccgcaagggttcctgtggggggcggcggcgtccggcccgcaaacggaaggggtcaccaataagcgccatcgttccatctgggacagctggtttgccgaacagccggagcgattttatcagcaggtagggccgcagaccgtgtgtgatacttatcatcagtatccgcaggacgtggcgctgatgaaacagaccggcttcaactcatttcgtacctcgatacagtggtcacgactgatcgctgatttggaaaccggcgcgccggacccggacgcggtgcgtttttatcacgcctatctggatgagatgatcgccaacggcattgagccgatgatcaatctctaccactttgatatgccggaagcgctgcagaaacagtacggcggctttgaatcggcgcacgtagccgagctgtttgcccgctttgcccgcaccgcctttagcctgtttggccataaggttaaatactggataaccttcaacgagccgattgtgccggttgagggaggctacctgtacgactttcactatccatgtaagaaagatggccggctggcggcgcaggtggcgtttaacattatgctggcgcacgccaaagcggtaacggcttatcgtgaactggcgctggcgggcgagatcggcgtggtgctcaacctgaccccgagctataccctcaccgacagcgacgcggataaaaaagccgccgggtatgccgacctgttttttaaccgcagcttccttgacccgctggtaaaacatgaattccccaaagcgctgtgcgagatccttgccgcccacgactgcctgccgacgaccagcaaagacgacgcggcgttgatcctcagcgcggatatcgattttcttggggtaaactattatgtgccgcggcgggtaaaagcgcgtgagagcgaatatgacctcgattatttcaccccggaatactatttcgaaaacgcggtgaacccgcagggccgctttaatccttatcgtgataacaacgagatcctgccgcaggcgatctatgacattgccgccaatattcgcgataactacggcaatattaagtggtatctcgcggaaatcggcatcgcgatggatcgacaatcagagggcgagcccggggcggacggggtgatagacgatactttccgcatccagctgatggaggagcatctggtgcagctgcatcgggcgatagccgacggcgcgaactgctttggcgtgcaccagtggacgtttatcgacaactggtcgtggatcaatgccttcaaacggcgctacggcttctggcgactggatctggagaccggcgagcgacagataaaacgcaatgcgctgtggtttgccgaactggcgaccagcaacggttttaccagcgataaatagcgcgctgcgccagcgctccctctcaccggcgcggaaagggggagcgcgcgaggttacaccagttcgtctttattaatacccagccgcttcatgcgtgacaggagcgtggtgcgcttgagccccagccgctgggcggcgcctttcggcccggccaccacgccgttgctctccttcagcacccggacgatcagctgatattcatcctcaccttcctcaggcaggaccgccggcgtccgcggggcttccacgatatcccgctccggcagggagagctgcagtacgttgccgcgggtgagcaataccgcccgttcgataacgttttccagctcgcgcacgttgcccggccactccatacgcgtcagagtgcgcagggtttccgccggaatgctgtcgatattgcgccccatgcggcgggcgattttaaaggtaaacgccttcaccagcagcgggatatcgtcgggacgttcgcgcagcggcggcaggtggatcgggaacacgttgagccggtagtagagatcgctgcggaattccctgtcgataaccatctgcttgagatcgcggttggtggcggcgatcaatcgaacgtcggtctgaatcagcttgttgctccccagacgttcgaactcctgctcctggaggacgcgcagcagtttgggctgcagttccagcggcatatcgcccacttcatcgaggaacagggagcttttgtccgccagttcgaagcggccgatacgctgggcgctagccccggtgaacgcgccgcgttcgtggccgaacagatcgctctccagcagcccggcgggcatcgccgcgcagttcatcttcaccatccgccgaccgttgcgtccgctgaggttgtggatagcgcgggcgataagctctttgccggtgccggtttcgccgaggatcagcacggtgctgtcgctctgcgccaccatctctacctgcttgagcacattgttcatcgcctcgctgcggccgataatctccccgaattcgctctcgacattattgagctgctcggtgagggcgaggttctcatccaccagccgctctttcaggcgctgaatttcgcggtaggcgagggcgttatcgatagcgatcgacacccgctcggcgatctgccgcagcagcttgagattggtggtggtgaagacctgttcgtcgcactgcgccagcttaagcaccccgagcagggtattgccggacatcagcggcagcaggcatagggtctggatcttattgccccacatctcgaagagcattttctcatacggcgcgagagtgtcatgttcgtgcagattaagcagcagcatctctttgcttttgaacacgcgctcggtgagggtgccggcttcatccacctcgctctggtcgtgaaccgggtggctggcgtcaagataatgcgtggaatagatgttgagcttccccttgcggtcgctgcgcagcaccacgctgatggcgtcgatccggaagtagcgatggatctctttcgccacctcgctgaccagctcgtcgatatccagtcgcgagagcaccgcgttggtgatcgccaccaggatgcgaaagttgtcgcgctcgtggcacagcagatcgtaatcgacgttattgctgacccggttctgaatctgttcggtgacgacggcgacgatctgcgcgaaggtatgcagccgctggaactctttctcgctccacggccggttgtcacggcggaggaattcgcaaccgccgaagatccgcccgtccgccgccagcggcagcagcgaatagtatccgaacgggcgatagagcccgctgcggataagctgcggccaggtgtcggcaaaggtttcatgatcgcaatgcagggcatccggccgggagagtaagcgacgcaccggaccgtgggccaggacggtttcatcctcgtagcttaccggatggccggcctcatcgcaggcgtacctggccgcgcggtgattacccgcgttccacaggatgatggccgcctcatcggccagcgcggactgttgcaccagacgggtcagggtttcgcttagcgcggccagatcgggctgctgtaataaaagccgggtgatatcgaacagcccctgctggccgagatcgctcatcggtgtatacgacattgcttacgtccaaaacgcgccgacaacgcggcgcataagaaaatgatggtacaaataatagtatgttaataaagcggttattgccgctttaacccatccatgggcgcccgctggtttgggcaaaataattacgctggctttttcccggctcgcgctgcgcttagccgggctacatgtgcgcgcagttctgtagcccggaaaaggcgccagccgctatccgggacccgacgccgtcgttaacaaattctcggcagcggttcggcgtggggaagatcgagcgtccgcttcacgccgtacagcccaacggaacgtacgcccgggcggacgaccacttcgccgattatcgccgcatcgcgtcctaacgcgtgagaccgcaaatgcgccagcacgttttccgcctcgtcgcgggcgacggcgagcaccagcttgccttcattggcgaagttcagggcgtccagaccaagcagctcgcagacgccgcgcaccgtgtcgttgaccggcagcgttgcctcctgcagttcgatgccgcagccgctggcggcggcgaactcatgggcgaccgcgttaaccccgccgcgggtggcgtcgcgcagggctttcactccgctcagcgggcgcagggtctggataagcggcgtcagcaccgcgcagtcgctggacagcgcgccgtccagccccatctgctcgcgcaggttaaggatggtggcgccatgatcccccagcgtgccgctgaccagcagcacatcaccggcgctaatctgctgcgtcccccagtgaacgtccgccgggatggcgccgatgccggcggtgttaataaacagcttatccgccgcgccgcgcggcaccactttagtgtcgccggtgacgatggcgatccctgccgcccgggcggtgtcggccatgctggcgaccaccgcttccagggtggccatctccagcccctcttcgagaataaagccgcaggaaagatagcgcgggatggcgccgctgaccgccacatcgttggcggtaccgcagacggcaagcttgccgatattgccgccgggaaagaacagcgggtcaatcacgtagctgtcggtggagaaggcgaggcggtccccctgggcggcgagcgccgccagatcgaggcgcgcctgatcctcctgctccgccagccaggggttggcgaaggcctgcataaacaggtcgccgatcagctgctgcattgcctgtcccccgctaccgtgggctaactggacgcttttcatacttcattttcctgactgcgatattgataccaggcggcgcaggccccttcagaggagaccattagcgcgccaaaggcgctttgcggattgcaggtgctggcgaagagcgggcactggtgcggtttacagcggccggtcagcacctcgccgcagcgggcgcgcgggtcgtcgcacacgcgctgcggcgccgggcgaaaatgcgcctcggcatcgaagcgctgataggctggcgtaagttgcacgccggagtcgctgatgacccccaggccgcgccattcgctgtcgccatccaggcggaagacgtcggccatcgccgcctgcgccagcgggttgccctcatccggcaccacgcgacggtactgattttccacatcgctgcgctgcgctattgtctgctcaaccagcatcaccgcgccttgcagtagatcaagcggttcgaaaccggcgaccactaaaggacggtgatagtcgctggcgataaagccgtaggcctcggtgccgatcaccatactgacgtggcccggggcgagaaaggcgtcgattccgttctccggctggtccagcaggctgcgcagggtcggcagcagggtgatgtgctggcagaaaaagtagaagttatcgacgttgcgctctcgcgcctgacgcagggtcagggcggtagcgggcatggtggtttcgaaaccaagaccaaaaaagaccacctcgcgctgcggattttgctgcgccagccgcagagcgtccatcggcgagtaaacgatgcggacatcggcgccgcgggctttcgcctgcagaagcgagccgtttttacccggcacgcgcatggcgtcgccgaaggtgcagaagatcactcccgggcggctggcaatctcaatgcaggcgtcgatgcgccccatcggcaggacgcacaccgggcagccgggcccatgaataaattcgatgttctccggcaacagctggtcgagcccgaatttaaaaatggcatgggtatggccgccgcagacctccatgatgcgcagcggtcgcgcggcggtgtgcggcagcagacgagcacgctgctgaagatgggccaccagctgcatcacctgttcgggggcgcggtattcatctacgtaacgcattatcgctcctcgccgtacagcagcgcgccgacgtccggctccacgtcaaacatattttgcagcgcctcgagggtgtcgcgggcttcggcttcattaatgacgctcatggcgaagccgacgtgcaccagcacccactggccgagccgcggctggccctgctcatctacggcgccgaccagcgtcaggtcgacgtcgcgctgaataccgcaaacttccaccttcgccagcacgccgtcgatggcgcaaatttgtcccggaatgcctatgcacatcgctgcgtctccagccaggtgagccactgctccatgccttcgccgctggtggcggagacaagaataatgtcaatatgcggattgacctcgcgggcgcaggccaggcaccgctcaacgtcgaaattgagatacggcagcaggtcgactttgttgagcagcatcaggctggcggcggcgaacatatgcggatacttcagcggtttgtcttcgccttcggtgaccgacagcaccgccaccttatggcgctcgccgagatcaaagctggccgggcagaccaggttgccgacgttttcgataaacagaatgccgcggtcagccagcggcaggcgcggggcggcgtcggcgatcatctgggcgtcgagatggcagcctttcccggtattgacctgaatcgccggggtgccggtggcgcgaatgcgggcggcgtcattgaccgtttgctgatcgccttcaatcaccgcgcagtcggcgcgtcctttcagccgggtgagggtttcggtgagcagggtggttttgccggagccggggctggaaaccagattcagcaccagctgctgttttgctgcgaagcgtgcgcggttgcgtgccgccaggcggttgtttttatccagcacgtcgatctccacttccagcatccgccgctggctctgccccggggcgtgggtacccgcttcgccgtggccgtaatgcaggtcgccctctggcgtgcgggtgggggcgaagtggtcgattttgacaccggtgatggtcatcgtctggcgtggggcgggcgcgaagggggcgctgcggaacgcggaatgcgggtttcgttcgtctccttcaatatagaggttgccttcgccacagccgcatgttgtacacataatttactccaattctaaacgctgaatctgtaagccgtcatccgccacgatctgcagctggtcgttattgcagtgcgggcagcggcgaacgtgctgcgagacaagatggacgtactgctgacagcgatcgcaccagcattcagcctgttgttcggtgatatgcagttcgcacccctccgccagcgtgccgcggcagaccagctcaaagcagaaggtcagggcgctggcttccacgcaggaaaatgcgccgaccttaagccacacgccggtaacccgccgcgcgccggcctgctgcgcctgttgttcaataatttccagcgcccgctggctgagggtgatttcgtgcatagtcgcctccgtatcgcgatgcgccttctatgcaataacgatgccagaatgaaatcgtcgtggcagtcaatgtcgatgtcgacgccccggggctgtcatcgacatgtcgcatcggcagaggtcgataaaaaaaacatagttaaatcaattaaataaaacctagcatgaaaaatgcttagagggtgcatctcatgctacggagaaaccgatatgactatttgggaaataagtgaaaaggcggattacatcgccgaccgtcaccggcagcagcaggagcagtggcacatctactgtaactcgctggttcaggggatcaccttgtcgaaggcccgcctgcatcacgcgatgagctgcgcgccggacaaagagctgtgcttcgtgctgttcggccattttcaggtgttcgtcgccctcgcggaaggcttcaacagccacaccatcgagtactacgtcgaaaacaaaaacgggggtgataagtatctgattgctcaggccaccctcgcaatggatggcacggtggacggccgcatcagcaaccgctcccgcgaccaggtgctggagcactatctggcgattatcgccaccgtctatgaccgtctgtatgacgccatggaacaagaccaaccggtggatttaagccatctggcgctgacccactgatcgtaaggtgtcgacacgtgtcgaaaatgacacctgcgcaaccttatttcgtcaaaaatgactttcacccgaggatgacccggtgaaccgttttgtaattgctgactccactgtctgtatcggctgccgcacctgcgaagccgcctgctctgagacgcatcgccagcacggcctgcaggctatgccgcggctgcaggtgatgcgtaatgaaaaagaatcggcaccgcagatgtgccaccactgtgaagatgctccctgcgccaccgtctgcccggttaacgccatccaacgcgtcgatggcgcggtccagctcaacgagagcctgtgcgtaagctgcaaactgtgcggcattgcctgcccgttcggcgccattgaattttccggcagccgcccgctggatatcccggcgaatgccaatacccggctggcgccccccgcgccgccggcgccggcgcgcgtcagctcgctgctcgactgggtaccgggcgtgcgcgctattgccgtgaaatgcgacctctgccacttcgatgaccagggcccggcctgcgtgcggacctgtccgaccaacgcgctgatgctggtggatagccgtgatatcgcccaggccagcaagcgtaaacgccagctgacctttaataccgaccttggcgacttgtcgctgttccaggcgcaacagggggagagggaatgagtgtaattggattagtgaatcaggcggtggcgtggtatgccgccagcgccgtactggcctttctgtttgccatgcgcaaaccgctcagcggcgccattgccgggatcggcggcgcggtggccagcgccatgctggtggtcaccggcggcgccgcgctgctgatgccggagcggatccacggcggcatgctgcagtttctccacctgacgatacgggtggggggcgtcaacgcgctgtggctgctggccatcggcctgtcggcgctgccggtgtcattgttcaatattagctggcatcgccacccgcaggtgaaggccaacggcccgctggtcaacctgctgctggccgccgcgacctgcgcggtggtggtgaccaatatcggttcactggtggtgatggcggagatcatggcgctctgcgcggcgtttctcaccggctgcgccgcctccggtaagctgtggtttgcgctggggcgtctcggtactttgctgatggcctggacctgctggctggtgtggtcaacctacggcaccctcgagctggcgcagatcaaccttcaggcggcggatatgatgcagaacccgctgctctggctgccgggtctggtggggttcgccctgctggccggggcgatcccgctgcacggctgggcgccgcaggcccacgccggggccagcgcgccggccgccgcgctgttttccacggtagtgatgaaagtcggtctgtacggcatgctgaccgtttcgctggccggcggcgtgccgccgctgtggtggggcgtgatgctgctggcgctggggatgatcaccgcctttatcggcggactgtatgcgctgatggagcataacattcagcgcctgctggcctatcacaccctggagaatatcggcattatcctgctggggctgggcgccttcgtcaccggcgtggcgacccgcaacagcacgctgatggtgctgggctttatcggcggcatgtatcacctgattaaccacagcctgttcaaaaccacgctgttcctcggtgccggagcggtgtggttccgcaccggccatcgcgatatcgagaagctgggcggcatcggtaaaaaaatgccgctgatctccctcgccatgctggtggggctgatggcaatggcggccctgccgccgctgaacggcttcgccggcgaatgggttatctatcaatccttcttcaaaatgagcactggcgacctgtttattggccgtctgctggggccgctactggccgttggcctggcgatcactggcgcactggcggtgatgtgtatggcgaaagtctatggcgtgaccttcctcggcgcgccgcggacgaaagaggcggaaaacgccacctgcgccccctggctgatgaccctgagcgtggtgctggcggcggttttctgcctcgttggcggcatcgccgcgccgtggctgctgccgctggtgagcggcgccttcccggtgcaggctcaggtatcgagcgtggtgtcgcagccgatgatcgcgctgctgcttatcgcctgcccgctgctgccgttcctgctgatgatcttctttaaaggcgatcgcctggcggcgcgctcgcgcggcgcggcgtgggtctgcggttacgaccacgagcagtcgatggtggtaacggcccacggctttgccatgccggtgaaagaggcctttgcgccgttgctgaagctgcgtcactggctgaacccggtgcgtctggtgccgggctggcaatcggcctcggcgccggcgctgctgcgcgggatcgcgctggttgagctggcggtgctggtggtgattgtcatttcgcgaggagcctgagaatgagtctgttaattgcattgctacaggcgctggtgctgtttgccgtcgcgccgctgttgtccgggatcgttcgcgtcgcccgcgcgcggctgcttaaccgccgtggaccgggggtactgcaggagtatcgcgatatcctgaaactgctgggccgccagagcgtcggtcctgacgcctcgggctgggtgtttcgcctgacgccgtacgtcatggtgggcgtgatgctgaccatcgccaccgcgctgccggtggtgacggtagactccccgctgccggtgctgggggatctcatcaccctgatctacctgttcgccatcgcccgtttcttctttgccatttccggtctggacaccggcagcccgtttaccgcgctgggcagcagtcgcgaagcgatgctcggcgtgctggtggagccgatcctgctgttgggcctgtgggtggcggcgcaggtcgccggctcgacccatatcagcgccatcaccgataccctttaccactggccggcggcgcgcagcattccactgattctggcgttatgcgcctgcgccttcgccacctttatcgagatgggcaaactgccgttcgatctggcggaagcggagcaggagctgcaggaagggccgctgtcggaatacagcggcagcggctttggcatcctgaagtggggcatcagcctcaaacagctggtggtgctgcagatgtttgtcggggtcttcttcccgtggggccagatgaccagcttcagcgtcggcggcctgctgctggcgctggtggtcgccatcgttaagctggtggttggggtgctaattatcgcgctgtttgaaaacagcatggcgcgtctgcgtttttgtgccacctcccgcgtcacctgggccgggtttggtttcgcctttttagctttcgtctccttgctggtggcgtgattaagagagtttgagcatgtctgaagaaaaaatcggtcaacactaccttgcggcgctgcaccaggcctttcccggcgtggtgctggacgaagcctggcagaccaaagaccagttaaccatcaccgtgaaggtcaactacctgccggaagtggtggagtttctctactaccagcagggcggctggctgtcggtgctgttcggcaacgatgaacgtaagctcaacggccactacgcggtctattacgtgctgtcgatggagcagggcaccaaatgctggatcaccgtgcgcgtggaagtggacgccaacaaaccggaatacccgtcggtgacgccgcgcgtcccggcggcggtatggggcgagcgcgaagtgcgtgatatgtacggcctggtgccggtcggcctgccggacgaacgccggctggtgctgccggacgactggccggacgaactctatccgctgcgcaaagacagcatggattatcgccagcgtccggcgccgaccaccgacgccgaaacctacgagtttattaacgagctcggcagcaagaaaaacaacgtggtgccgattggcccgctgcacgtcacctctgatgaacctggccacttccgcctgttcgttgacggcgagaacattatcgacgccgactaccgcctgttctacgtccatcgcgggatggaaaagctggcggaaacccgcatgggttataacgaagtgaccttcctgtcggaccgggtgtgcggcatctgcggcttcgcccacagcaccgcttacaccacctcggtggagaacgcgatgggcatcgtggtgccggagcgggcgcagatgatccgcgccattctgctggaggtggaacgcctgcactcgcacctgctgaacctcggtctggcctgccactttaccggctttgactccggctttatgcagttcttccgcgtgcgcgaaacctcgatgaagatggcagagatccttaccggcgcgcgtaaaacctacggcctgaacctgatcggcgggatccgccgcgacctgctgaaagaggacatgatccagacccgtcagctggcgcagcagatgcgtcgcgacgtgcaggagctggtggatatgctgctcagcacgccgaatatggaacagcgtaccgtcggtattggccgtctggacccggaaatcgcccgcgacttcagcaacgtcggcccgatggtgcgcgccagcggccacgcccgcgacacccgcgccgaccacccgtttgtcggttacggcctgctgccgatggaagtccacagcgagcagggctgcgacgtgatatctcgcctcaaggtgcggatcaacgaggtttacaccgcgctgaatatgattgatttcggtctcgataacctgccgggcggcccgctgatggtggaggggttcacctatattccgcaccgcttcgcgctgggcttctccgaggcgccgcgcggcgacgatatccactggagcatgaccggcgacaaccagaaactgtaccgctggcgctgccgggcggcgacttacgccaactggccgaccctgcgctatatgctgcgcggcaacaccgtttccgatgcgccgctgatcatcggcagcctcgacccgtgctactcctgtactgaccgcatgaccgtggtcgatgtacgcaagaagaagagcaaagtggtgccatacaaagagctggagcgctacagcatcgagcgtaaaaactcgccgctgaaataaggaatcgccatgtttacctttattaaaaaagttattaagaccggcaccgcgacgcacgcctacccgctggagccgatgccggtggacaaaaactttcgcggcaagccggagcatacgccacagcagtgtatcggctgcgcggcctgcgtgaacgcctgcccgtcgaacgccctgacggtcgagatcgatctggccactaaccagctggcgtggcagtttaacctcgggcgctgcatcttctgcggtcgctgtgaagaggtctgcccgacggcggcgattaagctgtcgccggagtatgaactggcggtgtggaagaaagaggatttcctccagcagtcgcgcttcgctatctgccactgccgggagtgccagcgtccgttcgcggtgcagaaggagatcgactacgccatcgcgctgctcaagcataacggcgatacccgcgccgagctgcaccgcgaaagcttcgaaacctgcccggaatgcaagcgccagaaatgcctggtgccgtccgatcgtattgaactgacccgccatatgagggaggccagctgatgagtactttacttggcccgcgcgatgaaaacggcattcccgtgccgatgacggtggatgaatccatcgccagcatgaaggcctcgctactgaagaagattaaacgttcggcctacgtctaccgcgtcgactgtggcggctgcaacggctgcgaaatcgaaattttcgccaccctttcgccgctgttcgacgctgaacgcttcgggattaaggtggtgccttcgccgcgccatgccgatattctgttgtttaccggggcagtgactcgcgcgatgcgctccccggcgctgcgcgcctggcagtcggcgccggatccgaagatctgtatctcctacggcgcctgcggcaacagcggcggcatcttccacgacctgtactgcgtctggggcggtaccgataaaatcgtaccggtcgacgtctatattccgggctgcccgccgacgccagccgccacgctgtacggcttcgccatggcgcttggcctgctggagcagaaaattcatgcccgtctgccgggtgagctcgacgaacagccgaccgagctgctgcatgccgatatggtgcagactctgcgggtgcgcatcgatcgcgaagcgcggcgtctggcgggctaccgctatggacggcagattgccgatgactatatgcgtctgcttggccagggcgacagccaggtgctgcgctggctggaggcggagaaagatccgcgtctgaccgagatcgtcacccatctcaaccaggtggtcgagggggcgcgtatccgatgagcgagacggtggtgttcagtcagctgagccgtaaatttattgatgagaacgacgccacgccggatcaggcgcagcaggtggtctattacagcctggcgattggccaccacctcggcgtcatcgactgtctggaggcggcgctgagctgcccgtgggacgcgtatctggcatggatcgccacccttgaggccggaagcgccgcgcggcgcaaaatggagggcgtgccgaagtatggcgaaatcgtcatcgacagcagtcatgtggcgatgctggccaacgcctttgataaagcgcagtccgcgcagaccccgcagcagcaggcgtggagcaaaaccctgctcagcatgctgcatgatattcaccaggagagcgccatctacctgatggtgaggagattacgtgactgacgttttactctgtgtcggcaacagcatgatgggcgacgacggcgccggcccgctgctggcggagatgtgcgcggctaacccggccggccagtgggtggtcatcgacggcggcagcgcgccggaaaacgacatcgtggcgatccgcgaattacgccccgaacgcctgctgattgtcgatgccaccgatatgggcctaaaccccggcgacattcgcatcatcgatcccgacgacatcgccgagatgtttatgatgaccacccataacatgccgctcaactatctggtcgatcagctgaaagaagacgtcggcgaggtgattttcctcggcattcagccggatatcgtcggtttttattatccgatgacccagccggtgaaagaggccgttgcccgggtgtatcagcagctggcaggctggcagggccagggcggctttactcagctggaggccgcggacgactagccctgcggcgaaccgggctctccgccggcgcacgactggccggaagggagccccgttcccggcgctgccagttcaagattctctatcactaatttaccgggcgacaccgagactctgacctgcgtgccgaccggaaaccccgcctgctccagccagtcgccgtttaagcttaatgccgcgtggcgggtgtagcgccgcgtctcccgcgttttgcggtcctcatggcgttttctgacatatcccacggttaactggcgaatggccctggctatccctctggctgcggtagggtgctgtgcgctcatgatgtgctccttgctgaagataccccggtaaaagtactggataaaataccagttattgtaaacaggtggcaaaccagaagctggaatcaggctcgagaaaaaagcatgtaatggatgcaacagatagccgacgcccgtcccccggttagcgcggggaacgggcgcgcgtgggcgagggtgcttagtcgagatcggcgccgttactggctatcaccttctggtaccagaagaatgactttttacgcttacgcgccagggtgccgttgccggcatcgtcgcgatcgacatagacaaagccgtagcgcttgctcatctcgccggtggacgccgagaccagatcgatgcagccccagctggtgtagcccagcaccggaatgccgtcgccgatagcgtcacgcattgccctgatgtgctcgcgcaggtagctgatgcgatagtcgtcattgatgtccccattggcatcgatctcatcgcgggcgccaagcccgttttccaccaggaacagcggtttctgatagcggtcgtacatcaagttcatggtgatgcgcaggcccagcgggtcgatgccccagccccattcgctggccggaatgtgcgggttcttcagcgacttgacgatgttggcggcattggtgttgctggcgttcatctccgccgaggcgcagcgcgacgcgtagtagctaaaggagacgaaatcgacggtgtttttgaggatctcgtcatcgcccggctgtttcgcaatcgtgacccctttttcccggaacacccgcgcggcccacaccggataggcgccgcgggcctggacatcgataaagaacaggttttcgcggtccttctccagcgccatccatacatcttccggcttgcaggagtaagggtagaaattaccgccggccagcatacagccgacctgattttgcgggttaatctcatgggcgattttcgtcgccagcgcgctggccaccagctcgtgatgcgcggcctgatacttcacctgctcctgattttctccctcctcaaacaccagaccggcgccggagtaggggctgtgcagcatgatgttgatttcattgaaggtgagccagtatttcaccaggccgtcaaaagcttcaaagcaggtgcgggcgtagtggctgaaaaaatccaccattttgcggttgcgccaggagccgtactccatcaccagatgcatcggcacgtcgaaatgacacagggtgaccagcggctcgataccgtgctttttgcactcctcgaacagtgagcgatagaaggcgatgccctgcggattcggctgctgttcgtcgccgcgtgggaacaggcggctccaggcgatggaggtgcgaaagacgctgaaccccatctcggccatcagggcgatatcttctttatagcgatggtaaaaatcgatcgcctggtggctggggtaaaattcgtcttcacgcagcgtaaagcgcttctccaggcctaattttaccggcaggcgatgcgcgccgtggggaagggtatccacggtggtcagccccttaccgccttcaagataagcgccttcagactggttggcggccagtgcgccgccccataaaaatccctgtgggaaactctccatgcattacctcattatcaatagtgtattcaggcgtgggatgcctgggcccgggcctggcgcgctctggcgtcggcagcggcctgctcaacgggaatgtcctcaaagccaaggatcagcgtcagggcaaacgacagcaccaccgacagcgccatcacgccaaacacccagacgatggtcattggattggccggatcgaaaaactgcacgctggtaaacagccccggcgccgccatcgaatggctggccagtccggcaatacctgccaccgcgccgcagataaagccgctgattaagctggcgatcagcgggcgcttcaggcgcaccgccacgccatacagcgccggttcggaaatcccggccagaatcgccgatgccgcggcggccagcgccgtctggcgcagctccgggtttttggttttccacgctaccgccagcgaagagccgccgagcgacaggttggcgccgatctccgatggcatcaccataccctctttgccggtttcggcgatggtctgaatgatggtcggcgtaaagacgcggtgcataccggtcatcaccaacagcggccacagcccgcccatgatcgccaccgacagccagccgagatagctgtggatcgtatacaccagcgcggaaatggcgctgccgatccagatgcccagcgggccaatcagcaggatcgccagcggggcggcgatcagcacgatcagcatcggcttcagaaagtttttcgtcaccgccggggtaatgcgatccacccagcgctcgatatacgacaggcaccaggtcatcaccagcgccgggatcaccgtgtaggtgtatttcaccgcggtaaccggaataaaggcgaattcaacgtgttctccctgggcggctttggccatcaattcgataaacccaggatgcaccagcaccccggcgatggcgatagccagcgacatattagttttgaatttcaccgccgcggaggcggccaccatcagcggcaggaagaaaaatgcgccgtcgccgataagcgccagcagggtcagcgtcggcgagcctttcggcaacgcgccgctcatctcgaggatcatcgccagcagcttgaccatcgatccgccgataatcgccgggatcagcggtgacatggtgccgatcagcgcgtcgaggatcccggcgccgatgcgtttcagggtcagcggcgctttgccctgcggctcagccgggcgcaggtcgccaggcagcagattcaccacctcgcggtaggcctgggagacagtgttgccgatgatcacctggcactggttatcgctgcgcacgacgccgagcaccccggccaggcctttcagggtagagctatcgacctgttcgtcgtctttaaccacgaagcgcagacgggtcatgcagtgggtaacggcggcgacgttgtcgaccccgccgattgccgcgactatctgttgcgccagggctgcataatttttcgacatcggattttatcctgtttatcaatagggtactaatctgccaccgccccgcatcgccgggcgataccatgtttttataggaaaccggttccacaaaatcatggtgagtttcatttaattgcacaagaaataaaaaaatatgatctcaattttgtgattttgatcgctaagcgtcgccgtgagccggatcgcggtggtgaacaggggagtgctgtaaaagcgggaaacgtgcagtacactgcctgcaacttttgcaacaggaagaatcacatggcaacgatgctggaggtcgcaaagcgcgcgggggtatcgaaggcgaccgtttcgcgggtgctgtcgggcaacggctatgtcagccaggagaccaaagaccgggtgtttaaggcggtggcggagagcggctaccggccaaatctgctggcgcgcaacctggcgaccaaaaccacgcaaaccctcggcctggtggtgaccaataccctgtaccacggcgtctattttagcgaactgctgtatcacgtggcgcggatgacggaggataaagggcggcagctgatcctggccgacggcaagcacagcgcgcaagaggagcgggaggcgatccagtacctgctggatctgcgctgcgatgcgatcatcatctacccgcgctttctcaccgttgatgagatggacgagatcgttgagaaccactcgcagccgatcatggtgcttaatcgccgcctgcgccgccacgccagccactgcgtctggtccgatcaaaaagcctcggcgatgcgggtagtggagcggctgattgcgcttggccatcgcgatatcgcctttattaccggctcccttgactctcccaccggcgtcgaacgcctcgccggctacaaagacgcgctggctggccacggcatcgccctgaacgaggcgcttatcgccgaagggcgctggacgccggaaaccggggcggcgggggtggagagcctgcgtcagcgcggggttacctacagcgcgctggtggcgagcaatgacgatatggccatcggggcgatgaagcagcttcaccagctgggcgttaaggtgccagaacaggtctcggtggtggggtttgacgatattgctcttgcgccgtatatggtgccgtcgctcgccagcgtccgggtgccggtgacggagatgattaaagagagcatcaatcggctgatctttatgctggatggcggggaattcaactttcagcaaagctttcccggagcgctgattgaacgcgagtcgctggtggcgggcccctgtgcctgacgtcgtcagctgtcatcgtcactactgacgatgacagcaaagcccagctataatagtctttataatcaatatattaaaaacttggaacgtattatgcatactccggcgcgtaaccttcttactgctggagaaatggatgaaccgtttcattatcgccgatgcgagcaaatgtatcggctgtcgcacttgcgaagtggcctgcgtggtatcccatcaggaacatcaggactgcgcctccctgacgcctcacacctttcagccgcgtattcacgtgatcaaaggggtcaatgtttccacggcgaccgcctgccgtcagtgtgaagacgccccctgcgccaatgtctgcccgaacggcgccatcagccgcgataaaggctttgtccatgtgatgcaggagcgttgcatcggctgcaaaacctgcgtcgtcgcctgcccgtacggggcgatggaggtggtggtgcgcccggtgatccgccatagcggcgccggactgaacgtcgtggcggaaaaagccgaagccaacaagtgcgatctctgcttccaccgcgagagcggcccggcctgcatggaagtctgcccgacgcatgccctggtgtgcgttgaccgcaacaaacttgagcagatgaatatcgagaaacgtcgccgtacggcgctggcctggtaacaccgggtatgaacggggtgcaaatccgcattcgcggcaaagtgcagggggtcggtttccgcccctttgtctggcagctggcccgggcgcaggcccgctgcggcgatgtctgtaacgacggcgacggcgtactggtgcggctggtcgggggcgacgacggttttactgccgctctggctgaccactgcccgccgctggcgcggatcgacagtaccgactgcaccccctatcgctgggcggctctgccgcaggatttcaccattcgcgagagcgggacgggacggatgcgcactcagatcgtgcccgatgccgcgacctgcccggcgtgcctcgcggagatgaacgatccccgggcgcgccgctaccgctacccctttatcaactgcacccactgcgggccgcggctgaccattattcgcgccatgccctacgaccggcccttcaccgcaatggcgccgttcccgctctgttccccttgtgaggcggaattccgcgatcctgccgatcgccgttttcacgcccagccggtggcctgtcccgactgcgggccgcgactggaatggcgggcagagggggaaacgctggacggcgaggcggcgctgcaggcggctatcgcccggctggcggcgggcgacattgtggcgataaaaggcatcggcggctttcatctggcctgcgacgccggtaattccgcagccgttgccacgctgcgggcgcgaaaacaccgtccggcgaaaccgctggcggtgatgttgccgtcagcggcgggcttacccgccgacgccgcggcgctgatgggctccccggcggcgcccatcgtgctgattgctgaagcgcaggtctccggcctgtgcgacgagattgcgccagggcttgcggaagttggggtgatgctgccgtctaatccgctgcagcatttgcttctgcagggcctggcgcgccccatcgtaatgacctccggcaaccttagcggccgtccgccgacgttaagtaatgctcaggcgctcaatgagttagccgacattgccgacggctttctcttgcataatcgcgacatcgtacagcggatggatgattcactggtgcgctcaagcggtgaaatgctgcgccgcgcccggggctacgtcccggacgcgctgccgctgccgccggggctaggagacatcccgccgctgctggctctcggcgcggatatgaaaaataccttctgcctggcgcgcggcagcgaagcggtgctgagccagcactttggcgatcttggcgaggaaggtgttgaacagcagtggcgcagcgccctgcagctgatgcagagcatttacgcgtttgtgccgcagcgggtggtggttgatgcccatcccggctatcgctcaacgcagtgggcggcctccctgcccttgccgctggagacagtgctgcatcaccatgcccacgccgcggcatgcctggcggagcaccgctggccgcttgacggcggggacgttatcgccctgacactcgacggtattggtatgggggagaacggcgcgctgtggggcggggagtgcctgcgggtcaactatcgcgaatgcgaacatcttggcgggctgccggccgtcgcgctgccagggggggacctggcggcacgccagccgtggcgaaatttgctggcccactgtttggcctttgtccctgactggcaggattatccgcaggccgcccccctgcgccagcgcaactggccgctgctggcgcaggccatcgatcgtggcattaacgcgccgcgcgcctcatcctgcggacggctgtttgatgccgttgcctgcgccctggattgcgcgccggagagtctgagctatgaaggcgaagcggcctgtcggctggaggcgctggccgccagctgccccggcgtcagccacccggttacgctgccgtggtgcgacgacgcgctggatttagcgaccttctggcggcaatggctgagctggcaggcgactccggcgcagaaagcctgggcattccacgacgccctggcctgtggactggcggcgatggcccgcgactgcgccaccgtccgcggcatcgacacgatggtctgcagcggcggggtgctgcataaccgcctgctggcggcgcgattgaccttttatctggcggattttactctgctgtttgcacagcagttgccggccggcgacggcgcaatcgcctatggtcaggcggtgatcgccgccgcccgcgggcaggctcaaggaatacaaccatgataatgacagttttacgccagcagccgcgcgccgcgggtctggtgctggggttgatcgcggcgaatttactggcctggtgctgggcgctgcaggcctttggcgacagcggcgcgctgatggccgccagcctgctggcctggggctacggcctgcgccacgcggtggacgccgaccatattgcggcgattgataacgtgacccgcaagatgatgcagcaggggcggcggcctttcgccgtcggggcttggttttcgctgggccactcatcgattgtggtgctggcctcggcggcgattgccgcgaccgccaccgccttcagcacgcagatgagctggctgcatgataccggcagcgtcattggcaccgccgtgtcggccctgtttttactggcgatggcctttatcaacctggtgattttacgcagcgtgtggcgcagctttcgggcatggaagcgcggggagccggtgagcgacgaaatcgtcagcggcggcggggtgatgagctggctgtttggcaagaccttccgtctgataagccgcagctggcagatgtacctggtcggtttcctgtttggcctcggttttgataccgccaccgaaatcggcgtactgggtatctccgccgccggcgcgtcgagcgggatttccgtctggtcgattatggtctttccggcgctgttcgccagcggtatggcgctggtggatacgcttgataatgtgctgatggtcggcgcctacggctgggcgttcagcaagccgcagcgcaagctctattacaacatgaccatcaccggtacctcggtggtggtagcgctgtttatcggcggcctggaagcgctgggtctgctgatggataagtttgcgctcagcggcggaatatggcgctgggtaggggcgttaaacgacaacctcggcgacgccggatttgtggtggtcgggttgtttgtcgcctgttgggcgctatcggtgcttaactatcgctggcgcggctacgacaatctggcgcgctaggctggatatgttcccggcttgcgctgcgcttagccgggctaccaggacaataccgtagcccggctaaggtgtttacgccgcaagccgggaaaaccatcaacttaccagttgtttgagcagcgcaaaggcttccttcattttgtcttcactcaccacaaaggcgcgcagctggttttcggcatccacgcctttcgccaccagcccctctttggcggccacgatattccacgtcagatcgtcgcggcgggtgtcgccggccagatgcagcggcagatccggggttttcaccttcaccagcattggcggcagcttgagttctcccgcctgcgccagcagatttttactcaggcacatggcgctgagtaaaatcggctgcaggaacggcagtaccacgccgttgatttccgcacagtcgccgagcgcataaatcgccgggtcgctggtttgcagctggctattgaccacaataccgcggttaatctgcagtccggcgtggcgcgccagcgacgtttccgggcgcaggccggcggcggccaccaccgcatcgacggttatcgcgcgctggcgatcgagactgacgcgaatgccgtcggcggtttgctccagcccctccagctgcgttttcagcatcagatgtacgcccatctcggtgagccgatgctgcaggcggctgctggcctccggcggcatcagcgccgccagcacgctggcggagttatcgactaccgttaccgctttaccggcgcggcagaaatccatcgccagttcgcagccaatcaggccgccgccgacgatcagcacgcgcttcgcgtcgtgcagccggctctgcgccgcgccatattcgcgctggctattgagcgttagcatcagctcgcgccccggcaccggcggaataaacggcgtcgcgccggtggccagtaccagtttgtcgtagcgccactggttatcctggctcttcactaaccggttttcggcgtcgatatcgcttacccaggtatggggaaacagacgcagagtgtactgctcggcgaactcgccggcgctttgcagggtcagatcgtcggccttctgtccgcggctgatgacatggctgaggtccggtttgttgtattcatccatgctatcggcggcgatgagggtcagcgggatttgcgcatcctgcttacgaatatttttcaccagctggcgggccgcgaagcccgagccgatgatgacgatgccatcactcattttgcctccgtcgccagtacgtcaaagacatctttgccaagagaacactcagggcagaggaaattgtccggcacttcactccacggtgtacccggctgtacatcctggttaggttcgcctttcgccgggtcatagacccactggcacacgctgcactgcatcatgggaccgagatcggcggccgcggcggcggcacaggcgcagtcctgtggttccggcgttgtcgctgcttcagcaaccggcagcggcgagagggcccactggcgggcgatgtcgcgaccgtgttggcggcacagctccagcgcgtcgatatccgggcgccatttggctttcaggctcagcgacatctcaaagccggcatcctgcaggcgggtggacaggcggtctaccgcgccgccgctccagccgtgcgagccaaaggcgctggcgcgtttattgcgaaaacgcagcccggtcatctcttccaccagcccggcgattttcggcatcatcacgttgttcatggtggacgtgccgacaagtacgcctttcgagcggaaaacattggtgaggatgtcgtttttgtcgctgcgggcgacgttaaagattttcaccgctacccgtgggtcaacctcggtgatcccctgggcaatggcgtccgccatcatgcgggtattattggacatggtgtcgtagaagatggtgatgcgatcttcctgataatccgccgcccactcgaggtatttctcgacgatttgcgtcgggttatcgcgccagaccacgccgtgggaggtggcaatcatctccaccggcaggttgaaaccgaggatttcagtaattttcggcgtcaccaggcggctgaagggcgtcaggatgttggcgtagtagcgctggcactgttcgtacagttcagtctggtccacttcatcgttgaacagatgttcgtcgcaatagtgctggccgaaggcgtcgttgctgaacagcaccgcgtcgccggtcaggtaggtcatcatgctgtccggccagtgcagcatcggcgtttccacgaagatcagctgtttaccgttaccgatgtcgagagtatcgccggttttcaccacgtggaagttccactccggatgatgatggtggccgttgatcgagtcgatggcgttggcggtgcagtagatcggcgtatcggggatctgcatcatcagttcggtcagcgcgccggcatggtcctcttcggcgtggttaatgacgatatagtcgaggtcggcgaggtcgatttcgcggcgcaggttctgtacgaactcgcggctgaatttatgatcgacggtatcgatcagcacgtttttctcttcgcggatgagatagctgttgtagctgctgccgcgcagcgttttatattcggtgccgtggaaatcacgcacttcccagtcacgttggccaacccaaagaatgttatttttcaccacaatagacatagcaacctcaatcaatacagtgtgtttaaactcagttgactggcttatatcaagttgcgtgccaactttttaattcattgataattatctatttttaattttttctgattttggttgttgtcaaaatgacaatggttaaaatagtcgatatgataatgcgtattgtcaaaatgacaatggagcggcaatgagtttttccgtcgacgagctggcgagaatcgccatagatttacaaagcgatattggtcacaccgaccgcttttcgcgcctgattactaccctgcggcaaattcttggctgcgatgcctcggcgctgctgcgctatgaggcgcatcagtttgtgccgctggcgatcgatggcctggcgcaggatgtgctcggtcggcgctttgccctggaaggacacccgcggctggaggcgattgcgcgcgccggcgatgtggtgcgcttcccggcggatagcgacctgcccgacccctatgacgggctgatccccggtcatgagagcctcaaagtccatgcctgcgtgggactgccgctgtttgccgggcagacgctgattggcgcgctgaccctggacggcatggatgccgatcgtttcgatagcttcagcgatgaagagctgcggctgattgccgcgctggtggccggggcgctgaataatgcgctgcttatcgcccgccttgaagcgcaaaacgtcctgccggcgcaggcggtgaattacccgctgccggagcgccaggagatcatcggcctgtcggggcccatgctgcagctgaaaaaagagatcgatatcgtcgccgcctcggatttaaacgtgctgatcagcggcgaaaccggcaccggcaaagagctggtggcgaaggcggtgcatcaggggtcgccgcgagccgccaaccctctggtgtacctcaactgcgcggcgctgccggaaagcgtagcggagagcgagctgttcggccatgtgaaaggggcatttaccggggctatcagcaaccgcagcggtaaatttgagatggcggataacggcaccctgtttcttgacgaaatcggcgaactgtcgctggcgctgcaggccaaactgctgcgcgtgctgcagtatggcgatattcagcgcgtcggcgatgaccgcagcctgcgggtcgatgtgcgggtgctggcggcgacgaaccgcgatctgcgccaggaggtggtggaagggcgctttcgcgccgatctgtaccatcggctgagcgtcttcccgctgtcggttccgccgctacgcgagcgggaaagtgacgtggtgctgctggcgggctatttctgcgagcagtgccgcctgcggatggggctggcgcgggtcattttggctgaggcggcgcgaaaccggctgcagcagtggtcctggccgggcaacgtgcgcgaactggagcatgctatccatcgggcggtggtgctggcgcgggccacccaggccggtgatgaagtggtcctggagccgcagcatttccagtttgcggtggcggcgccgatgttgccgactgagacggcggcagcggcgcccgcgacgggaaacatcaatctgcgcgaggcgaccgactcttttcagcgagaagccattagccgcgcgctggaggcgaaccagggcaactgggcggcgaccgcccgagcgctggaactggacgtcgccaacctgcatcggctggcgaaacgtctggggcttaaaggatccccgcctggtaaaagttctgcaggttaatggcgccgaccagttggccgttctcatccactaccggcgcggcgctgattttgtgtttcatcagccgctctttggcttccaccgcgcggctatccgcctgcagcgttacgccgttgcgggtcatcgcccgagtgacgccatcgttgagcgtaccgccagcaaccagccagcggcgcaggtcgccgtcggtgaaaacgccctgcacgcggttggcttcatcgcagaccgccaccaggccgagtccggttcggcttagttcgagcatggcgtccatgacgttagcctcggtattgacccgcggcacttcttcatcacgacgcatcaggtgatgcactttgttcagcagccgcgcgccgagggcgcccgccgggtgggaacgggcgaaatcctcttcattgaaaccgcgcgcctgcatcaccgccatcgccaacgcgtcgcccagcatcagcgtgttgacggtgctggaggttggcgccagatgcatcgggcaggcctcgcgctccacggcgatatccagcaccgctttcgccgccagcgccagcggcgaggtggatttgccggtcatcgccagcagcggaatgcctttttcttccagccgcggcacgatgagatccagctctttcgcgctaccggagtaggagataaacagcatcacgtcgcggctatcgagcatgccgagatcgccgtgcagggcttccgccggatggacgaaaaaggccggggtgccggtgctggcgaaggttgccgccagctttttaccgatgtggccggatttaccgataccggagacaatcagtttgccctcgcagtggataatggtttccgccgcgcggatgaagtcgtcgcccaggcgctccggcaggcggctcgcctcctgcagctcaagcatcagggtctggcgtccggcctctaacaaaaagttactcatgatgttctccagtaataatgacttcaatgcctttggcttccagcgcccgctggaattccgggtcaatatcggcatcggtaatcaatttatccacgcgttcaaggccgcagacaatattgggacttttacgaccaaacttggatgagtcggccatcaggatcacttcgcgggcggcgttgcacatcgctttgctgacggtatagacctcattaaaggtagtgactccggcgttcagatcgataccgtcggtgcccataaacagcttgtcgaagctgaactgttcgaaggcgttttccgccagctggccgtgaaaagaggccgattttttacggaaggtgccgcccggcatcaggatggtctgctcgttatcgaactctgatagcgcgttgacgatatgcaggctgttggtcatcaccgtgatgttattaaagtgactcagcaatggcaccatctgcagcacggtgctgccggcgtcgaggataattgaatcgccatcgtggatgtatcgcacggcggcctcggcaatctgggcttttttatgggtgttgatcagcgtcttatggtcaatcggcggatcggcttcatccttgttgagtaccacgccaccgtaggtgcgaatgacggtgccggcgttttccagcgtgaccagatccttgcggatggtggtgccagtggtatcgaagtgttgcgccagctcttcgaccgagcattttccctgcgactgcaggaactcgagaatggctgcctggcgctgacgtggtttcataggcgtctatcctgcgtttaagtttcgaagtgataatttcgcaagatatttacttttacaacgaaattatccatgtttcggattaagcgctaatgatagtgcattctgacagcgcggatcatggggaaagatcacatcaggctgcaattccgcaatatgtttgcctgccagagccgggatcttttgcggactggcgaaaatggtgaagcctttcatcagcagcgtgtcgctaatgcggtcgttatcatcgacggcgatggcgacgatggcgcgcggttgaaagcgcccggcggagcggccgacgcccacccgcccctgctggcacaggctatcaaaggcgcgattgaagcggcggatctgccagccgccaaaggccagctgggtaagccaggcgatggcggcgacgatgattaatgcagtaaccataggtctctccttaaggggggcgggaacagcccaggtcacggcgcgagcgcctaacccgagcgacccgcggtgccgttttttgtcgggtggcggctaacgccttacccgacctacagttttgtagcccggataagcgcagcgccatccgggaacctgttaaaacatcacctggccgccggtgacgttgatcgactgcccggtgcagtacgacgcctgtgggctagcgtaaaacatcaatacgttcagcacatcctgatattcgcagccgcgcttcagcggcaccttgtcgatgtagtactgctcgacttcgctctcatcgataccgagcttggtggcatactgcggcagcagcgactggaacatcggcgacttcagcagattgccgagcatcagcgaatgcacggtaatgccatattccgccagatccagcgccagcgactgggtcagcccgacgccgccgaacttcgccgcgctgtagccggagttgtgcttactgccgactttgccggatttcgagttgatctgaatgatccgccccttaatgccgtcgcggatcatcaaccgcgagaactcgcgggcgcagagaaaatagcccaccagattgacctgcagcgagcggtcgaaatcccccagcgcgaagtcgctaataaacgccgccttggcgatcccggcgctgtacaccagcaggtcgacgcgcgaaaaaatctcatccaccccgtgggccagggcggtgacgctggcctcgctggtggcgtcggcgccgaagccgtacgccataccttcgccatactcagcgttaatctcctgggcgacgcggctggctttttcgctctgaatatcgaccaccgccacgcggtagccctcggcggccagcccgcggcacagaaactctcctaaggtttgtccaccgccaatgacaacagcaacctgattcatctctctctccttttaagcaacaaacttcagtacgcagccgggcgcgatggcgtccggcaccgggcccgccacatggacggtacctgggaactccgcttcacgatggccgtcaaagcgcagggtgatgtggcccagctcgcgcaggttttgttcagcgacctcgccgacggcggtcaccgggtagcgctgttcgccaagctgcagctctgcccccggctgcagcgtgccagcaagctcgccgtggttgtgaataaagcagtactcttcgatatccgccggggcgccctcgcggaaggtgatcagcatttgctcttccagcgccatcgtcgcgcaggcgccgatgtgcgtaatggtggtctggtaaatcacagtcatctgcaggaacctcttactggtaaataaatccggaaacgaaccacgcgatcagcaccgttggtgcgccggtcagaaagcggctgaccagcaccgacggcacgccgacgcgcacggtatcctggcgggcttcggctagcgacaggcctaccggaataaaatcgcaggcggcctgggcgttaatggcgaatagggcgggcagggcgaggtgcggcggaatgttgccgaggccgatttgaacgccgatcagcacgccgatcacctgggcaataaccgcgccggggccgagaaacggcgacagcagcgggaaagagcaaatcagcgccagggttaccagccccagcggatggctggcgagcggcgccaggccgtgggcgatccagtcgccgatgccggaggccatgatgatgccgatcagcgccgagacgaaagccataaacggcagaatggttttcagcaccgtatcaatggtgtcgcgcccggcctggaacagcaccgccaccaccgaacccatgcccatcccgaccttcgccagcaggccatcgctctgttcagtaatcttcttgctggtgtcgtaatcgcgacccgcgctcttgttttccgccggcggctcggaaacccctgcgctgtcgggagggatgcactggatgttgtcctctttgacgccggagacataaatatcttccgtgatgtactgggccagcggccctgatttgccggtggcatgaatattcaccgtcgggatgcggcgcttaggatagagcccgcagcgcagggtgcccccgcagtcgataattgccacgccgatgtcgctttccgctggttccccctctttaaacccgtccaccggctgccagccggtcaggctggcgatgcggtcaacgatcgccgggcgggtgccggcggtgatatagacgatctttttgccttcgacggcgtcgagctcaagcgggccgccccagccgccggtgcctttctctatacgaatacgggtcatgatgtcgctcctgacagatgcactttccgggaaagctgaatcgccatttttctctcgaaaatcgaggtggtcaggtcggtgacccagccgcggaagaagttagtcaccagcccgaccagcaggtagctcaccgccagcggaccgagcggtaggccgagggtagtgaggccgttggcgatgccgagatagacgaacagctcgccggggttgatatgtggaaacagcccgttcattgagtggcagctatacgacgccgccgcgtaatagctgggcttgtacttctctggcataaaccggccgaggcttaacgtcattgggttacaaaacacgaaggtgccgatgcagggtagcagcaggtagcgggagattgggtttcctgcgcagcgctgcgccagcttctcgatccgctgctggccgataaagttgatcagcgcgttcatgatcaccagcaggctgatcagcaaggggaggatcccggtcaccatgccggtaaatacctcgccgcctttctgaaacaggccgataaaccactccgcgccgtgggtcacgacgtcaatcattgttctctccttcagcatgttatttttcttgctaatcgcaggctgattttaatcattttgaaaggtttaaaagtgttagatggatcgcaaaatgaaagataaatattttattttgaaagatgatgcgggcgagatgaaatgttgcagggcatgaaagcacgcacgggaggagccgttgaaggactattttgtctacaaacagattgtcgctttcttgttggtcgtcgcatgctttaccataattatcccttgctgaatttgttaaacggaattcccatgttgaagcgtcgctatctggctttacttcccctttgtgtgctcctcgctgcctgcagcagcaaacccaagacccccgcggaaacggagatggcgagtggaaccggcggctttttgctggaaccgcagcataacgtgatgcagatgggcggcgacttcgccaacaacccggcggcggcgcagtttatcgataagatggtggcgaagcacggcttcgacaggcagcagctgcaggagatcctgtcgcaggcaaagcgcctggattacgtcctgcggctgatggatcgtcaggcgccgaccggcctgccgccaaccgggccgaccggcgcctggctgcgctacaagaaacagttcattaccccggataatgtgcagaacggcgtggtgttctggaatcagtatcaggacgcgctcaaccgcgcttatcaggtttacggcgtgccgccggaaatcatcgtcggcattatcggcgtggagactcgctggggccgggtgatgggcaaaacccggatcctcgacgcgctggcgacgctgtcgtttagctacccgcgccgcgccgaatacttctcgtcggagctggaaactttcctgctaatggcgcgcagcgaaagcgacgacccgctggatctgaaaggctctttcgccggggcgatgggctacggtcagtttatgccgtcctcctataagcagtatgcggtcgattttaacggtgacggacatatcaacctgtgggacccggtggatgctatcggcagcgtggccaactacttcaaacagcatggctgggtgagcggcgatctggtggcggtgcaggcgctggggcaggccccggggctggagaatggtttcaagactaaatacagcgtttcgcagctggcggccgcagggctgaccccgacccagccgctgggtaaccatcagcaggccagcctgctgcggctggacgtcggcaccggctatgagtactggtacgggctgccgaacttctacaccatcacccgctacaaccacagcacccactacgcgatggccgtctggcagctgggcctggcggttgcgcaggcccgcggcggttattaatcctttcatccggctgacaatttcccagcctccccggatagcggcgcgtagcgccttatccgggctacggtctggtatccggttgctagccccggtaagcgcagcgcgaccgggggagagttcaatgacagcttgtcgcccatcggcaacactgcggctacgttacgcgccgtcatccgcacgttggcggcggagttcgccagcgctttatccgggttacggtctggtatccggttgctagccacggtaagcgcagcgcgaccgggggatgacgccggggaggccgcgcttatccccccgttttttcccgtctccatgcctcttgttgacctttgttacatttccgctgactgacgctgatttacattctttcttcgcttcgttattgttatgttataacattaaattgaggcaggggtatgttcacatcgatttttatggcatccggcgcggcgcgcgcggctatcgcaggcgtgctgctggcggcgctatggttagcaacctggtgggcggtgacgctgccatgattgaactggagcagctggtcgccggctatgacggggtagcgatcacccctccgctgagcgggatgatatgccccggcagcctgacggcaattgttggcctcaatggctgcggaaaatcaacgctgctgaaaaccctcgccgggtttcttcctccggtcagtggccgcctgtgctggcagggaaaacggccggtgatcggctggctggcgcagcgccatgccctcgagtcgcagtttcctctcaacgtgcaggatgtggtaagccagggcgcatggcccggcgtgtcgctgctgcgcggtctggggggcggcacccggcgacgcatcggcgcggtgctggagcgggtcgggctggcgggcctggcgaaaacgccgatcgaagcgctctccggcggccagtttcagcgcatgctatttgcccgggtgatggtgcagcaggcgccgctggtgatgctcgacgagcccttcaccggtatcgacgaagcgaccagtcgcgaactaatggatttgatcctcgagatgcaccggcagggacagaccatcctggcggtgctgcatgataaccagcgggtggccgactttttccccgagacgctgctgctgactccccagcgcgcctgctggggcgctacccgggcggtgctcccggccttcagtcatgtgaggtcggcatgatctggcacaccttctttcagcctttcattgaattcggctttatgcgtcgggccctcgtggtgtgtctggcgctgtcgctgagcaccaccatgctgggcgtcttcctgctgctgcggcgcatgagcctgatgggcgatgcgctgtcgcacgccattctccccggcgtggcggtggggtatctgctgagcggcatgtcgctgctggccatgaccctcggcggcttcatcgccggcatcgtggttgccctggtggccgggtgggtgagccggcggacaccgttaaaagaggacgccagttttgccggattttatctgggctcgctggccctgggcgtcaccctggtgtcgctgcgcggctccagcgtggacctcctgcatctgctgtttggctccattctggcggtcgaccgcgatgcggcgctgtttgtcagcggcgtcgccagcctgacgctattgtgcattgcgctgtgctaccgcggtctggtcagcgaggcgttcgacagcgcctggctgcaggtgaatcaccggcggctgcctgcgctgctgcatgggctttttctggcgctgctggtgcttaatctggtggccgggtttcaggtgctcggcacgctgatggcggtaggggtaatgatgctcccggcggtcgccgcgcgctgctgggcgcgcacgctgccgggcattctgctactggcggcgggaatgggcgcgctctgcgcctggctgggattaagcctctcctgggcgattagtcttcccgccgggcccgctattgtgctgaccgccagcgcactgttttttgtttcgctattttttggcacgcgcagccggctgctggtcggttggcgcacattgatggggtaaggaaatgatgaaacgtagtgcaatagtggtcgcgctggccctcggcctgatggcgcagggggccatggcgaaaacgctgaatgtggtaagcagtttttcggtgttgggtgatatagcgcagcaggtcggcggggagcatgtccatgtggataccctggtcggcccggacggcgatccgcacaccttcgaaccgtctccgaaggatagcgcgctgctcagcaaggccgacgtggttgtggttaacggcctggggctggaagggtggctggatcgcctgattaaggcctctggttttaagggcgagctggtggtggcatcgaaaggcgtcaagacccatacccttgatgaagagggtaaaacggtgaccgatccccacgcctggaacagcgcagcgaacggcgcattgtatgcgcagaatatcctcgatggtctggtgaaagccgacccggaagataaagcagcgttgaccagcagcggcaagcgctatatcgaccagctgacgtctctcgacggctgggcgaaagcgcagttcagcgccattccgctggccaagcgcaaggtcctgaccagccatgacgctttcggctattttggccgggcttaccacgtgaccttcctcgcgccacaggggctctcttcagagagcgaggccagcgcggcgcaggtggcggcgctgattaagcaaatcaaagcggatggcgtccatacctggtttatggagaaccagcttgacccgcggctggtgaagcagattgccagcgccaccggcgcgcagccggggggcgaactctatccggaagcgctatctaagccgggcggcgtcgccgatagttacgtcaaaatgatgcgtcacaacgttgagcttatcgctaacagcatgaagtaacaggttgtctggtcgtcctggttatcacaggacgacccatttctggatcccccctcgtaaaatcgccgcttcatccccatatctctgtcgaaagtgctatctttgatggcctctttatccagagcaaagcggggcgataatgaccgattcagaattaatgcagctaagcgagaagattggccgggcgctgaaggcgcgtggggcgacggtgaccacggcggaatcctgtaccggcggctggattgcgaaagcgatcaccgatattgccggcagctcggcgtggtttgaacgcggctttgtcacctacagcaacgaagctaaatcgcaaatgatcggcgtcagcgaagcgacgctgcgcgacaacggcgcggtaagcgaaccggtggtggtggagatggcgattggcgcgctgcgcgcggcgcgtgcggattatgccatctccgttagcggcgtcgccgggccggatggcggcagcgtcgaaaagccggtcggcacggtatggttcggcgtcgccagcgtgagcgggcaaggggtgacgcggcgggaatgctttgccggagaccgcgaagcggtgcgtcgtcaggcgacggcctatgcgctaaatctgctctggcaacaatttctacaaaacacttgatactgtatgactatacagtataattgcctcaactgaacaaatattaacggcgaagcgaacacgctttaccctgcatgattaggagtaacaatggcgatcgacgaaaacaaacagaaagcgttggcggctgcactgggccagatcgaaaagcaattcggtaaaggctccatcatgcgcctgggtgaagaccgcaccatggatgtggaaaccatctccaccggctcgctttctctggatatcgcgctgggcgccggcggtctgccaatgggccgtatcgtcgagatctacggtccggaatcctccggtaaaaccaccctgacgctgcaggttatcgccgcagcgcagcgtgaaggtaaaacctgtgcgttcatcgatgctgaacatgcgctggatcctgtctatgcacgcaaactgggcgtcgatatcgacaacctgctgtgttctcagccggacaccggcgagcaggcgctggagatctgtgacgcgctggcgcgctctggtgcggttgatgttatcgtcgtcgactccgtcgcggcgttgacgccgaaagcggaaatcgaaggcgaaatcggcgactctcacatgggccttgcggcgcgtatgatgagccaggcgatgcgtaagctggcgggtaacctgaagcagtccaacacgctgctgatctttatcaaccagatccgtatgaaaattggcgtgatgttcggtaacccggaaaccactaccggtggtaacgcgctgacgttctacgcctctgtgcgtctggacattcgccgcatcggcgcggtgaaagagggcgacaatgtcgtcggcagcgaaacccgcgtcaaagtggtgaaaaacaagatcgccgcgccgtttaaacaggccgaattccagatcctctacggcgaaggcatcaacttctacggcgagctggtagacctcggcgtaaaagagaagctgattgagaaagcgggtgcctggtatagctacaacggcgacaaaatcggtcagggtaaagcgaacgcgatcacctggctgaaagagaacccggcggcggcgaaagagattgagaagaaagtgcgcgaactgctgctcaacaatcaggatgcgaagccagacttcgttgttgacggcaacgacgcagaagaaaccgaacaggatttctgatatcgtctgcaagactgacagggctgcttaggcagcccttttgctttgtgagattatcgaggtgcctgtgactgaaccttcatcacgccgctccggctacgcccgcctgctggaccgtgctatccgcattctggcgatgcgcgaccacagcgagcaggagctgcgacgcaagctggtcgctccggtgatgagcaaaaacggtcctgaggcgctggacgtcacccccgacgagctggagcaggttgtcgcctggtgtatcgaaaaccgctaccttgacgacaaccgcttcgtcggccagttcatcgccagccggagccgcaaaggctatggtccggcgcgcattcgccaggagctcagccagaaaggcattgcgcgccaggtcgttgaccaggcgatgcgcgaatgcgatatcgactgggtgagccttgccagggagcaggcacagcgtaaatacggcgaaccgttaccttccgcctttactgaaaaagtgaaagttcagcgattcctgctttaccgcggctacctgatggaagatatccaggaaatctggcgaaattttgcagattgacccatccgggattttacttcgccgtaaagaaaacttatcttattcccactttattccgtcgggccgctggttgtgactgtgcaggcagcggcctgggcgattattcctttacacaaaatcattcaagctgcatcagggcggcaagagagactctctttcgcaacgtacgtcagttcggtgccggaagagcaagcgcagccaggacagaggcgacttgaaggatgacgtgtagcttgatttcaggataattatgagcaagagcaccgctgagatccgtcaggcgtttctcgactttttccatagcaagggacatcaggtagttgccagcagctccctggtgccgcacaacgatccgaccctgctgtttaccaatgcagggatgaaccagttcaaggatgtcttccttggtctcgacaaacgtaattattcgcgtgcgaccaccgcacagcgttgcgtgcgtgcgggtggtaaacacaacgatctggaaaacgtcggttacaccgcgcgtcaccacaccttttttgaaatgctgggcaacttcagctttggcgattacttcaagcaggatgccatcaaatacgcgtgggaactgctgaccggtgagaactggttcgcgctgccgaaagaaaaactgtgggttaccgtttacgagaccgatgacgaagctttcgacatctgggccaatgaagtaggcgttccgcgcgagcgtattatccgcatcggcgacaacaaaggcgcgccgtttgcttctgacaacttctggcagatgggcgacaccggtccgtgcggcccgtgcaccgaaatcttctttgaccacggcgatcacatctggggcggccctccgggaagcccggaagaagatggcgaccgttacattgagatttggaacatcgtcttcatgcagttcaaccgtcaggctgacggtactatggagccgctgccgaagccgtccgtcgacaccggtatgggtctggagcgtattgccgcggtgctgcagcacgttaactccaactatgacatcgacctgttccgcgatctgatcgccagcgtggcgaaagtcaccggcgcgaccgatctgacgaacaagtcgctgcgcgttatcgccgaccacattcgctcctgcgccttcctggttgccgacggcgtgatcccgtcgaatgaaaaccgcggctacgtgctgcgtcgtatcattcgccgcgcgatccgtcacggcaacatgctgggcgcgaaggacaccttcttctggaaactggttgccccgctgatcgatgtgatgggctccgccggcgacgagctgaagcagcagcaggctcaggttgagcaggtgctgaaaaccgaagaagagcagtttgcccgcaccctcgagcgcggcctggcgctgctggatgaggagctgtcgaagctgaaaggcgacaccctggacggcgaaaccgccttccgtctgtacgacacctacggcttcccggtcgacctgaccgccgatgtgtgccgcgagcgcaacatcaaggttgatgaagctggttttgaagccgcgatggaagagcagcgccgccgcgcgcgcgagtccagtggtttcggcgccgactataatgcgatgatccgcgttgacggcgcctctgaatttaaaggctacgatcatctggagctgaacggcaaggttaccgccctgtttatcgacggcaaagcggtggatagcgttagcgctggccaggaagcggtggtgatccttgatcagaccccgttctatgcggagtccggcggccaggtgggcgataaaggcgaattaaaaggcgcgggcttctccttcgcagtcagcgacacgcagaagtacggccaggctattggtcatatcggtaaagtcgccagcggcacactgaaagtgggtgacgcggtgcaggccgacgtagatgaggctcgccgtcagcgtatccgtctcaaccactccgcgacgcacctgatgcacgcggcgctgcgccaggtgctcggcacccatgtggcgcagaaaggttcgctggtcaatgataaagcgctgcgctttgacttctcgcattttgaagcgatgaagccggaagaaattcgtgcggtggaagacctggtcaacgcgcagatccgtcgtaacctggctatcgaaaccaacattatggatatcgatgccgcgcgcgcatccggcgccatggcgctgtttggcgagaaatacgacgatcgcgtgcgcgttctgcggatgggcgacttctccacggagctgtgcggcgggactcacgcggcgcgtaccggcgatatcggcctgttccgcatcacgtcagagtccggcaccgctgctggcgtgcgccgtatcgaagcggtgactggcgaaggcgcgatggccatcctgcatgcgcagagcgatcagctcaatgatatcgctcagctgctgaagggtgacagccacaatctcggcgagaaggttcgcgccgcgctggagcgtacccgtcagctggaaaaagagctgcagcagctgaaagagcaggctgcggcgcaggagagcgcaaacctctccagcaaagcggaagagattaacggcgttaagctgctggtcagcgaactgaccggcgttgagccgaaaatgctgcgtaccatggttgacgatctgaagaaccagctcggttcgacgatcgttgtattagctacggtagcggatggtaaggtttctctgattgcaggtgtgtctaaggatgtgacagaccgcgtgaaagcaggggagctggttggtatggtcgctcagcaggtgggcggtaaagggggcggtcgtccggatatggcgcaggccggtggtaccgatgcgtctgctctccctgcagcgttagccagtgtgaaaggctgggtcagcgcaaaactgtaataactataaacgcatttaccctaaataattcgagttgcaggaaggcggcgacgcagcgaattcccaggagcttactctagtaagtgactggggtgagcgaggaaagccaacacgcatgcaacttgaagtatgacgggtataggtgccataaccagagggttacggcaccttgcgtcagaaacactgataacgataaagtcgggttgaaattgtgtatatcggctaaacttaggtttaacagaatgtgatgccatgactgcttataccctaaggtatttgtcatcgcttactttttggcgttatatgatggataatgccgggatacgagagacccgactcttttaatctttcaaggagcaaagaatgctgattctgactcgtcgagttggtgagaccctcatgattggagatgaggtcactgtgacagttttaggggtgaagggtaaccaggttcgtattggcgtaaacgcccctaaagaagtgtctgttcaccgtgaagagatctaccagcgtattcaggctgaaaaatcccagcagtccagttactaaggtttccgcgcctcgctgtgcagtgaggcgcatcacttaccgccgctttttccctttttctgttttttccccctgcgccataccgcttttcattaccctttgccgctttggtcgtttggcgttatgccagcgtcagggctgatttcctgttgataaattgccctttttgccgtttttgcacgcgaattgcgtgcgaagtgtgcaaacgaaaaaaggtctcgaaaaagtgtttgacttataagtaccagaaagtaatatgtgcgccatcgcagcgacgaagagcagaaacaagttcttcgaagcactcgaaagaggcgtgtgtggtgaggtggccgagaggctgaaggcgctcccctgctaagggagtatgcggtcaaaagctgcatccggggttcgaatccccgcctcaccgccattttgcatccgtagctcagctggatagagtactcggctacgaaccgagcggtcggaggttcgaatcctcccggatgcaccatcttctttctgaattaagagagaagagcgctgtgaaagcagcggcccgcagtgcgaggcataatcgagtcactctaccgattaggccatcatactcagtgtggcatgtgttagttgtgacactgacgcgtagtaaagcaagtttcccgatgcatccgtagctcagctggatagagtactcggctacgaaccgagcggtcggaggttcgaatcctcccggatgcaccattctttaataagaatggcaaatcgcgaaatttgatatcagaattacagcagtaatcccgatgcatccgtagctcagctggatagagtactcggctacgaaccgagcggtcggaggttcgaatcctcccggatgcaccatattctccttgataacagcgacgatgttgttttatggtctgcgaaattatcgccagcaccagggaggataacgttgcgtaagcaacggcccgtagggcgaggcgcagccgagtaatcctcccggatgcaccatattctccttagtaacagcaacattgttgttatctggtttgcgaaaccatcgtaagtgccaggagagtaaccccgcagtaaaatagctttcccgatgcatccgtagctcagctggatagagtactcggctacgaaccgagcggtcggaggttcgaatcctcccggatgcaccatattctccttagtaacagcgacgacgttgttttatggtctgcgaaatcatcgccagcaccagggggataacgttgcgtaagcaacggcccgaagggcgaggcgtagccgagtcatcctcccggatgcaccatattctcctcagtaacaacgacgatgttgttgcataggctgcgaaattatcgcagcacccgttctgaatgcataatcttcactcttctctcaccatcccgattacctcgttttccatcactggcttcatcctgacttttttattggcaagacgcgctttccactataatttatccttgtatatcagcgttatcaggctgagataaatgcaaggagagaaatccatgaaatggttcaaagcaatacctgctttttgcgcgacgctgctggtaacgacggccctcgctggctgtgcgggatcggctacaaaggagagtacgggcggctatattgacgataccgtggtgaccaccaaggtgaaaacggcgctctttaacgataaagacattaagtcctcagaaattagcgtccagacctttaaaggccgcgtccagctgagcggatttgtctcctccgcggagagcgctaaacgagccgtagaagtcacacgccgagtgcagggcgtgcgaatggtcgagaacgatctgcgtattaaataaggctggttatccggcctaatgtttgggggcgcctgagggcgcctttgtcgtctgcgccgctggccgcgacaacggcgggcttttgcgttacagtaatcattcccaaaccggttggtgagaagacaatgtacgaaggttacgcaggactgatctttgatatggatggcaccattctcgataccgagccgacccatcggcaggcatggaacgaggtgttgggccgctacggtatgcgtttcgacgaacaggcgatggtcgcgctcaatggctcaccaacctggcgaatcgcccaggcgattatcgaactcaaccaggccgatctcgatccacatcgcctggcgcaggaaaaaacccaggccgtcaaagcgatgctgctggacagcgtacgcccgttgccgctgattgaggtggttaaggcatggcacggccgtcgcccgatgtcggtgggaaccggcagcgagagcgccgtcgccgaagcgctgctggcgcacctggggctgcgtcattacttctccgcggtggtggcggccgatcatgtggtcaaccataaacccgcgcccgataccttcctgctgtgcgccgagcgcatgggcgtcgcgccggaaaaatgcgtcgtcttcgaagatgccgactttggtctgcaggcggcgaagcgcgcgggaatggacgcagttgacgtgcgtttgctgtgagcgacgcgctgtcactcacctcgctgtttgccagtagctttttaagcgccacgctgctccccggcaattcggaggttgtgctggtggctatgctacttgcgggggtcagtcatccgtggtggttagtattaatagcaacaatcggcaatagccttggaggggtaactaacgttattctggggcgcttgtttccgctgcgcaaaacctcgcgctggcaggagcgggcggccggctggcttaagcgctacggcgcggtcacgctcttactgagctgggcgccggttgtcggcgatttactgtgtttgctggcgggatggatgcgcatttcctggggaccggtactctttttcttatgccttggtaaggcgctgcgctatatcgctattgcggcagcgacgcttcagggcatgacgtggtggcactaattggactgacagttcatccattacaattatgcttattcaaacgatttcgacaggcgggaggtcaaattgatcccggacgtatcacaggcgctggcctggctggaaaaacatccgcaggctctgcagggtattcaacgtggtctggagcgggaaacgctgcgcgtgaacgcagacggcacccttgcaacgaccggtcaccctccggcgttaggctcagcgctaacgcataaatggattaccaccgattttgccgaagctttacttgagttcattacgccagtagatggcgatattgagcatatgctgacctttatgcgcgatgtccatcgctataccgcgcgtcagcttggcgacgagcggatgtggccgctgagcatgccatgctatatcgcccccggtcaggatattgagctggcgcagtacggcacctctaacgtggggcgcctgaaaacgctatatcgcgaggggctgaagaatcgctatggcgcgctgatgcagactatctccggcgtgcactataacttctccctaccgatggccttctggcaggcaaaatgtggtgtggaagatgccgagagtggtaaagaggccatttcggcgggctatttccgctcaattcgtaactactatcgctttggctgggtgatcccctatctgtttggcgcctcgccggcgatttgctcctcattcctgcaaggcaaaccgacaacgctgccctttgaggaaacgggcaacggcatgtattacctgccgtatgccacctcgctgcgcctcagcgaccttggttataccaataagtcgcaaagcaatctcggaattacgtttaacgatctgcacgagtatgtggcaggattgaagcgggcgattaaaacgccgtcggaagagtacgccaaaatcgggctgcagaaagacggcaagtatctgcagatcaacagcaacattctgcagattgaaaatgaactttatgcgccgatccgcccgaaacgcgtcacccgtcggggcgaaaccccgtccgatgcgctgttgcgcggtggtattgagtatatcgaagtgcgttcgctggatatcaatccgttctcgccgatcggcgttgacgcccagcaggtgcgtttcctcgacctgtttatggtctggtgcgcgctggccgacgcgccggagatgagcagcgatgagctgctgtgcacccgcaccaactggaatcgggtgattctggaagggcgtaagccgggcttaacgctggggattggctgcgaaagcgcgcagttcccgctggctcaggtgggcaaagatctgttccgcgatttacgccgcgtggcgcagaccctggacagtatccacggtggccaggcatatcagcaggtctgcgacgagctgctggcctgctttgacgatccggaattaaccttctcagcccgcattctgcgttctatgattgaagaaggcattggcggtaccggccgtgcgcttgccgatcgttaccggacgcagctgcgcgaagagccgctggagatcctgagcgaagacgattttatcgccgagcgcgacgcgtcggtggcgcgacaaaagaaagtggaagctgaagacagcgagccgtttgaggcgctgctggcgcggcacgcgtagcgctggaaaagaaaaaggccacatcactgtggccaaactttcatctctgattcagggatgatgatgataataaatgcgcgtctttcatatactgagactcgcggctgaacaaagagttcattttattttaaaaaaattcactcccggaggtgacgaatgccgttgttagatagtttcacagtcgaccatacccgaatggaagccccagcggtgcgtgtcgcgaagaaaatgaacacgccgcatggcgatgaaatcaccgttttcgatctgcgcttctgcgtaccgaaccaggaagtgatgccggaacgcggtatccacaccctggagcatctgttcgcgggctttatgcgcgatcatctgaacgggaatggcgtggaaattatcgacatttcgccaatgggctgccgcaccggcttctatatgagcctgattggtacgccggacgagcagcgcgtcgctgacgcctggaaagcggcgatggccgatgtgctgaaggtgaaagatcagaaccagatcccggagctcaacgtctaccagtgcgggacttacaccatgcactcgctggaagaggcccaggacatcgctcgccatatcattgagcgcgatgtgcgcatcaacagcaacgacgaactggcgttgccgaaagaaaaactgcaggaactgcacatctagtgcttccgccacggcccgacgcctgtcgccgggccgctcttctgacgccgcgatgacgacgacgctttccttctcctttcagcaccgcccactggtgccctttgcccatgattatgcccacggtgaccaggaagactggcatcagcatgactgcgcccagctgctgcatatactaagcggcgtggtgcgggtcgcgacgccggtaggctactgggtggtgccgcccgggcgcggcgtctggctgccggcgggaacgccgcacgcgctacgcatgaccggcaacgtggcggcgcgcaccctgtttatcgatccgctggcgcgcgccgatcttccggcgggctgccagatcgtacagatcacgccgctgctgcgggaactgatcgtgtcatccctggcgctggcggaacgctatgcccccgccagccgcgacgaaagaatttatgaactgatcctcgatgagatccgcgggatggcgatcctgccgtttggcctgccggagccgcaaagcgaaacgctgcgtcggctgtgccagcaggtacgcgaggcgccgggcgaggcctggagcagcggccaggcggcgaaggcgtgcagcatgagcgagcgaaccctaaaccgccattttcagcagcagactagcctgacgtggagcgagtgggtgcgccgggcgaagctaatggaagcgctggtgcgcctggcgcagggccactccgtgctgcgggtggcgctggagctgggctacggtagccacagcgccttcagcgccatgtttcgtcgggtgatgggcgtcgcccccagcgactattttcgtcccccggcctgatcggcggcgctgagcgcattgcacagcgcctgcagcgaggcgcgcgccacgtcattatcgatacccacgccccagtagctttctccttgcggaaaaacgcagcggatataggccaccgaccggctgtcgctgcgcgcgccgagcgtatgctcatgatagtccttgatcataaacggctgccgaaacagcgcgctgagcccgctggctgcggcggagagcaggccgttgccctggccctgcaggcgtcgggtttcgccgtggtgacgcagcgttgcctgcagggaaagctggccatcctgctggctggcgctctgataatcgagcagcgtcagcgccggctgcgcctgcagcccgtagcgcgtgcggaacagctgccacagcgcatggtgggtcatctctttgccgtcgctatcggtggcctgctgaacgtgctggctgaagtcctgctgcagcccgcggggcagtttcagaccatgattttgttcgataagccaggcgctgccgctcttccccgactggctgttgacgcggatcaccgcctcatagctgcagccaatatcctgcgggtcaatgggcaggtagggcatctgccacggatcgccaggctgacgggcatcaaacccttttttgatcgcatcctgatgggagccggagaaggcggtgtaagccagacttcccgcccacgggtggcgcgggtgaacggggatctggttgcagttttccaccacctccaccacccggttcatctgctcgaagcgaagctcagggtcgatgccctggctgtagaggttcatcgccaaagtcaccagacagacgttgccggtgcgttcgccgttgccaaacaggcagccttctacccgatcggcgccggccatcaccgccagctcggcgctggcgacgccggtgccgcgatcgttatgcgggtgcacgctgatgcagacctcgccgcggcgggagaagtggcggcaaaaatactcgatctgatcggcatagacgttgggggtgttgacttccaccgtcgccggcagattgacgatcatcggtcgctcggcgcagggctgccagacatccgccaccgcttcgcaaatctcaagcgcaaacgcgggctcggtgaagcagaaggtttcaggcgaatattcatattgccagcgggtctccggctgctgttcgcactgctgacggataagccgggtggcgcgggtcgcgagggcgatcacctcggccttgtccatgccgaaaaccagctcgcggaacagcggcgcggtggcattgtagaggtggacggtagcccggcgggcgccgcgcagcgcctcaaaggtgcgcaggatcagcgggtctcgcgcctgggtcagcacctggatggtgacatcctccgggatgcgctgttcgtcaatcagctggcggacaaagttgaaatcggtttgtgaggcggaagggaaggcgacttcaatctctttaaagccgcactccagcagcagatcccagaactgcagtttgcgggcgctgtccatgggctccgccagcgcctggttgccgtcgcgcaggtcagtcgagagccagcgcggggcgtgactgatttgccggtctggccagcggcggtcaggcagggcgatcggcggatagggacggtacttttcagcaggatggctcagcatagtgttctccttaatggtcagcctttatcctgcccgagcgcagggtgacgggctttcgcaaacgagacagaaactagcgagaactggacaacctgacgccgtaaaaaagggacccggaggtccctttatgtgaggcttagtgcgcgccgccgccgcctccgccggcgctgaacggtggtctggcgaaccacaccagccccaacagcaggatgaaaatagccgcagaaatccagaagatttcgttggcggagataatcagcccctggttggttatctgctgcgctatccagccggacgcctgctgctgcgtcattcccatgccctgcagctgatcgtatatctgctgcgcgttggggttaaagggggtcaccgattcggtgagctgcgcatgatgcagcgcctcgcggttggtccacagggtggtggtgatcgaggtcccgatggagccggcaagggtacgggtgaagttcgacaggctcgacgccgccgccagccgctccggcggcaggccggagagggtgatggtggtcaacggcatgaagaagcaggccaccgcgaagccctggataaactgtggccacgccgaggcgccaaagtccatccccggttcgaaggtccaggcgcgccagtagaagcagaccgcgtacataataaagctgaaggtgaccagccgccgcatgtcgagcttatgcgcgaagcggccgataatcggcgacagaatgaccgggatcacccccaccggcgccgacgccaggccggcccaggtcgcggtgtagccgtagacctcctgcaacagctgcggcagcagtacgatggcgccgaagtagagcatataggccagactgatacagaggcagccgatggtgaagttgcgcgacttaaatagcgacagatcgacaatcgggttatcgtcggttagctcccagacgatcaggaagcttatcgccaccaccgccacgatggtcagaatgataatctcattggaggagaaccagtccagctctttaccccggtccagcatcacctgcaggctaccgataccgatgatcagcagcgccagaccgacgccgtcgatccgccgctgttcggttttggtttcccggttgcgcagggtctgcagggtcatcagcaccaccgccacgccaatgggcacgttgataaagaagatccagccccagtgataattatcgctgatatagccgccgaggatcggaccgcagatgggcgcgacaatcaccgtcattgaccacagcgccagagcgatagagcgcttcgccgggggatagttgctgagcagcagactttgcgacagcgggatcagcggcccggcgacgatcccctgaatgacgcggaagaaaatcagcatcgtcaggctgttggagacgccgcaggcccaggaggcaatggcgaaggcggtggttgaccacaggaacagcttcacctcgccgacgcgcttggccagccagccggtgatcgggatggagatggcgttagcgaccccgaacgaggtgatgacccaggtcccctggctcagcgacgagccaaggttgccggcaatggtcgggatcgccacgttggcgatagtggaatccagcacctgcatgaacgtcgcgagcgacagcgcaatggtcataatgaccagttgcgcgccttccagcggtttttgctgttgcattacactcaccccgaattatccggcgttggcctgaatgatctcgtctatcagcttattaaccggatcgagagcgatttcgcgggcattgctctcgtaaaccggggagctccgcacctggctggccagcatttcaccatcgcgatcggtggtgttgacttccaccagcgtcgagagaccgatacgcagcgggtgttccgctagttgtttttcatccagctcgatacgaaccggcaggcgttgtaccactttgatccagttgccggtggcattctgcgccggcagcagagagaaggcgctgccggtgcccatatccagaccgaccactttaccggtgtatttcacgtcatcgccatagatatcgctgatcacggtggccggctggccgatacgcatatgcgccagctgagtctctttaaagttagcatcgatccacaggttggtcgccgggaccaccgccatcagcggcgtggtggtgccaatctgcgcgccaggctgtaccgagcgacgggaaacgtagccgctaatcgggctgacgatctgcgtacgctgcagggccagccaggcgttacgcacttcagtggccgcctggagcaccgccggctgctgttccagcctggtgcccagcacgatcgcctggttggcgttgtactgctggattgccacgtcgagttcggcctgtgcgctggcgacggtatcgcgggcgtgctgcagctcttcgcggccaatgaggttcgcggcgcccagcgggatgcggcggttcaagtcagcctgcgcctgggcgagggcggtttttttgacgtcgatatttgcctgcagctgcttgctgttgatcatctgctggcgggtctgacggacgctggcggccagttgggtcttagccttttcaaacgcctgttgggcatcggtccgatcgagcgtgaccagcggatcgcctttctgcacgtagtccgtgttgtcagcccagactttggtcacgctgccagcgacctgagccataatttgtacctgattccctgccacgtaggcatcgtcggtctcttcgtagtgacgcagtaccagaaaccagtaaatcccatatgccacggcaataataatgaagagcaatgtcagcaacagaagggcgcctttacgctttccttttttgctgcctggttgctgcggggtttggctctccgcatttgcactcatgttattctccacgatcttattatttcacatcggctgagccgacctgtttatcagaaaggccagcagagatctgctggcctggctgttttccttgcaacgtaaaaatgggctgagcgacgccgcccttagcgtagagagtccgctagcacgccttcttcttccatctgatcaaggcggctcaggagtttgcgggtgatgtgttcgagctgatctttttcgctggtgctaagtgaagaccacagctgatgcaggcagttatgctgcggcggcaggacttcacgcaaaaactgatggcccttttcggtcagttgcagatgcaaacagcgacgatcgttatcgctctcgcggcgctcaatccagccgcgtttttccagttcatcagcgatacgggtggcgttggtacgtgacgagcccagcgcacagctcagctcggacggctggatgctgtggttttcctgtgactccagcgtaatcagcgccataaataatgtctcgttaattccctgcgctttgagcattttattgcgattttccagcagcttaccttgcatatgcatgcaaagacgagttaacaggatctcctgaaacgggaaatcttcatggcggctggcgcggaacttgagcatttgctcaatgggagtaaacgaactatccatttgggtatgacctcattaattacagccgatataataactattgtgacaaataaatcaaatgaattattgaccaaaattgatacgtaaagcttagagcccgttggtgattttccatgccagaccataggcaaacgccgacagcagggtcgggacaatgatgctgcgggttttccagaaggcggcgcccagcaccaggaagccggtcagcgtcggcgccaggcgatgggcatcggctaggatctccggcacgctggagaccaccagcagcgcgcaaatcgaggcgatgccaatggtatccagcagcacgctgaccgggccgcggcgggcaggacgggcgtggccgacgcgcaaacgcagaggaagatagcgaaagagatagttgacgccgccgactatcaccccgagcagaaggacttcactgttcatccggcatccccttgagcatggcctgaagcagcgccgtcagacacccgcagacaattccggcgaggatcgccgccggaatggaaaataacaaaatgccgcccagcgcgcccgccagcgccgccgtgacgcagagtgactgctgacgctggaaagaggccagcaggaagctcataaacagcgccggcagcataaagccgagggcggcttccaccgccggataatccaccagcaggccgttgccggaccaggcgccggccagcgtgccgcacacccacgatgcccacgaggtaaaagcgagaccgagcatccagttttcgctccagcggcggttatcgcgaaccagcctggcggtagcggcggcgaaaacctcatcggtcaggccgaaggcccagagggcggttttctttttatccagcgctgagcgaatgcggctgcgcaatgaggggccatacagcacgtggcggacatccatcgccattaccgtcagggcggcgacccacagcgaactgccggcggccaacatggcggtgatcacaaactggctggcgccggcgtaaataatgcaggagaagaacaggctttccagtggggtgaagcccagccgggtggcattgagtccgaaggcgaatgccaccggaaggtagctgatgacgatggggagactgtctttgacgccttcgccgacggtggcgacacgttcaggtaaggcacaggttaagggcgcggggttttccatatgaataacttatcgctggatccatgtgaaggtggcaatttgaccgatgtctccaccttaacagagcgcgatgcgccttaacactatggaaattcctggaatcgcttttctatgacctgaccacgagaaaggggggcaaggggaccggataaggcgctgggccttatccgtgagcgggtttactgctgcgcggcgagggcggttttcacccagctgtcgaacagcggctggtgggctttgatccagccatcaacgtggccgttaatgtcggcttcggaagcatggccttcatgcatcatcgcattctcggcgttgatgtcggcgatcggtagcttcatgacgctaaacagagtggcggcggccggatttttctccgcccaggctttgttagcgacgatgtgcatggtgttcaccgggaagccatagttggcgccgttggccagtttggtgtcgatgtttttctgctcgcccggcagggaggagaacggcacctgcagccagacgacgtccttgccaggcttcagcacgtcgctaacccagtacggcgtccaggtgtagtagagcactggtttaccctctttataccgggcaatggtgtcggccatcatcgccgcgtagttgccctggttatgggtgacggttttgctcaggccataggcgtcaatctgatggttaatcactgcttcgcagccccatcctggggtacagccggtgagatccgctttaccgtcattgttggtatcaaacagtttggcgatctgcggatctttgagctgatcgatggaggtgatgtggtactgctcagcggtttttttgtcgatcaaatagccctgggcggcgcctgagacgtacactcctttgcgatagaatttgttatcaccgcccgccgcggcgtacatgtcatcgtgcagcggttgccagttggtggcgataaaggtggtatctccggcggcaatcgacgtataggcaacgttatagtccacttcgctgggtttctcgacggtgtagcccagcttctccagcgcgcgactgaccagcagggtctggaagctctcttcggagatagtgctctgagcgggcttcaccgtaatccctttacccggcaggtcggcggcgaaggcgctggtggcgagcagggtggcaaaggcggcggtggccaacatcgtactatgtcgcatggtggttcctcttattgtttaacgggaagggccgctcccgggcatcggctggtgccggggagcggcgctgttatcgacttatcgacagaaagggcgagtgataagccccagcgggccgggggtgtaccagcggcggttgccgcgactgcgggcgtcgcgaccgacggcctgggtgaggcggtcaagaataatcgccaggatcacgatccccaccccgccgacggtcgccaggcccatatccaggcgaccgataccgcgcagcaccatctggccgaggccgccgacggcgatcatcgaggcgatcactaccatcgacagggccagcatcagggtctggttaaccccggccataatggtgggcatggccagcggcagctgcaccttaaacagcagctggcgcgggctggcgccaaatgagcgcgacgcttcgatcagatccgcaggcacctggtttatcccgaggatggtcagacggacgatcggcggcagggcgaagataatcgtcaccaccacgcccggtacgttgccgatgccgaacagcatcacgatcggcaccagatagacgaacgccggcgtggtctgcatggcatccaacagcgggcggatgattttcgccgcccgcgggctgcgcgctagccagatccccagcggcaagccgataaccatgcagaacagcagggcggtgaggaccagcgccagagtgaccatggcttgcgaccacgcgccgatggcgccgatggcaatcagcgataccagagtggcgacccccatgccgaggctggagatctgccaggcgattagcgcgaagacgataatcgccaccggcgccggcatccccaacagcagctgctggaaggcgctgaggatgtagtcgatcggcacgcggatcccctggaacagcggacggaagtgcagcacgatccagtcgatggcgtgggtcacccagctgtcgagcgggatcagggtcttatggaacggatccatgatattgaactgttccggctgcggcgcaggggcgctgtgcagccagtcggcgccgccgccattagccggcgcggcagtagaggcgccaccccaggcgtcggcagcctgcgaggcgctgtcggttgacggggcgctgccccatggattggtctgatcagccatgattcaccccctcgcgatctaaagcctggagcaacatccgtttggaaatgatgccaatatattgttgttcttcatccactaccggcacggcgcacggagcgtggccgacgtgggagagcagatcgctgagcggggtttgcgcttccaccgccagcggggcgtcaatcagcgctgcctcgatcccctgcccggcgctgagggctgttttcagagaatcaatcgagacaatcccgacaaagcgattaccgcgctctatgacatagccatattcccggtcttcatcctgtaataatttcagcgccgaacgggggccaaaaccaggcgttttacgaatcaggccaaccgggctgcggcgggcaatatctttcgcgctgaatacctggctaatatccacgccgcggaagaaggtgcgcacataatcattggccggattatttaatatttcatccggagtgccgacctggaccacttcgccattttgcataatggcgatacgatcgccaattcgcatggcttcatcaaggtcatgggaaataaagacgatagtgcgttgatgcttcgcctgtaatttgatgagctcatcctgcatttcggtacgaatgagcggatcgagcgcagagaaggcttcatccattaacagaatatcgggattaatcgccagggcgcgagctaaaccgacgcgctggcgcatgccgccggagagttcatccggccaggcgtgggcataattctccagccccacctgacgcagcgcctcccgggctttttgctctcgttcggcggcgggaacgccggcaagcgccatgccaaacgccgtgttgtcgagcacgctcatgtgcggcatcagcgcaaaggactgaaaaaccatcgcaattttcttgcgacgcacctcgcgcagctcggcatccgacattttggcgatatcgaccccgtcaatcagcacctggccgcgggtgggttcaatcaggcgattgagaaggcgaaccatggtggatttccccgagccggagagccccatgatgacgaatatctcgccttcttcaatggccagactggcgtctttgacgccaagcgacagccccgttttttccagtatttgcgctttgttgagtcctttctcaatatatttgaaagcacggtgtggatgctcgccaaatatcttataaagatttttgatttctaatttaattgccatgcaatagagaagttcctgttatttgtttattgcgatatgatacccgatggtgattatgatctttttacaccctaacatactcagattctgtgacaaccctcaatggcaaactctcggcaaaatcagatgggggcaactgtggctaagcccccgtgatataagggctgggcggtaatttgttgttggtaatattttttgattatctttggataattcgactgaaatggaccggttttctgctaaatatgacgaagtgatgacggttaggtcatggagagaatatttggtggattaaacgctattttgtgaaattaatcaccaggaatccgcctgcgatattcctggtgaaagtacggttaaaagtcccaatcgtcgtcggcggtctcttccatttttcctatcacgtaggaggagccggaaccggagaaaaagtcatggttttcgtcggcgttgggcgacagcgctgcgaggattgccggattgaccgccgccatctccgccgggaacagcgcctcgtagccgaggttcatcagcgctttgttggcgttgtagcacaggaaagcgctgacgtcgtcgaaccagccgctctcgccgtacagctcccggctgtaggccagttcgttgtcgtaaagatccatcagcagatcgagggcgaaatttttcaattcttcgcgcttgccggggctgacgatctccagtcctttctggtacttgtagccgatgtaatagccatgcaccgcttcatcgcgaatgatcaggcggatcagatccgcagtgttggtcagctttccccggctggagaagtacatcggcagccagaagccggagtagaagagaaaggattcgaggaacacgctggcgatttttttcttcagcggctcgtcggcctgatagtaacccagcatcagctgcgccttgcgctgcagaggatcgcagctttcgctccaggcgaaggcggcatccacctccttgctgtggcacagcgtggaaaagatggagctgtaagagcgggcatgaaccgcctccataaagctgatgttcgacagcaccgcctcctcatgcggggttaaggcgtccgccattagcgccggggcgccgacggtgttctgaatggtgtcaagcagggtcaatccggtaaagacgcgaatggtcaactgctgctccgccgcgctgagggtttgccaggcgggaatgtcgttcgacagcggcactttctccggcagccagaagttgctggtgagacggttccagacctcaagatctttatcgtcatcaatgcggttccagttgattgcgctgacgcgcgttaaatgggtcatcctgttctccttacagcgcgcaggacacgcagccttcaatttcagtgccttccagcgccagctggcgcagacggatgtagtagagcgtcttgatgcctttcttccaggcgtaaatttgcgccttgttgatatcgcgggtggtggcggtatcggggaagaacagggtcagcgacagcccctggtcgacgtggcgcgtcgcctcggcgtaagtgtcaatgatcttctccggccctatctcatacgcatcctggtagagggccagattgtcgttattcataaatggcgcggggtagtacactcgcccggttttcccctctttgcggatctcaatcttcgagacgatcgggtgaatgctggaggtggcatggttgatgtacgagatcgagccggtgggcggcaccgcctgcagatagcgattgtagatgccatagcgcatgacatcgtcgcgcagctggcgccagctttcccggtcgggcagagagatgccggcgcgggcgaacagcgcgcgcacccgttcggttttcggctgccactcctcctgcagatatttgtcgaagtacgccccgctggcgtagcgcgactgctcgaagccggcgaagcgctggccgcgctcgcgggccagctgcatcgaggtgtgcagcgcgtgccaggtcacggtgtagaagtagatattggtgaagtccagcccctccgggctgccgtaggcaatgccttcccgcgccaggtaaccgtgcagattcatctgccccaggccgatggcgtgggaagccgcgttgccggccgctacggaaggaaccgactgaatgtcgctcatgtcggacacggcggtcagggcgcgcaccgcggtggcgattgtgcggccgaaatccggcgagtccatggtatgggcgatgttcagcgagccgaggttgcaggagatatcttccccgatatgggcatagctgaggtcttcattataggcggacggcgtactgacctgcaggatctccgaacacagattgctcatggtgacccgcccggccaccggactggcgcggttcacggtgtcttcaaacatgatgtacgggtagccggattcaaactggatctccgccaggcgctggaacaggtcgcgggcgcggatccagcgtttgcggacccgctcgtcggccaccagctgcggatagaggtcgccgatggcgcaatcggcgaaaggtttgccgtacagccgttcgacgtcataaggcgagaacagggccatctgcgcatcttctttcgccagctggaaggtgatatcagggatcaccacccccagcgacaaggttttgatgcggattttctcatcggcattttcacgccgggtatcaagaaagcgtaaaatatcgggatggtgaacatgcagccagaccgcacccgccccctggcgggcgccgagctgattggcataggagaaggcgtcctccagcatcttcatcaccggcaccaccccagaagactggttttcgatgcgcttgatcggcgccccggcctcgcgcaggttggagagtaaaaaggccaccccgccgccgcgcttcgacagctgtagcgccgagttcaccgcccggccgatggactccatattatcctcaatacgcagcaggaagcaggagatcagctccccgcgctgctgtttgccagcgttaaggaaggtcggtgtggcgggctgaaagcggccgctgagtatctcctccgtcagctgccgcgcctgctgttcatcgccccgggccagcgtcagggccaccatcacgctgcgttcggcgaaatcctcgaggtagtgcttgccgtcaaaggtcttcagcgcatagctggtatagaacttccaggcgccgaggaaggtctgaaagcgaaacggagcgcgccgggcatgggcgaacaacgccagcacaaacccgcggtcatagccggccagcacctgcggatcgtaatagccctcgctgacgagccagctgagcttatcctcctggctggggaaggtgagggcgttgggctgaacctgggtcgccataaaggcctcaaccgcctggcgatctttctcaaacgggatgcggccctcgctgtcgtacaaattcagcatcgcgttgagggcgtgaaaatccacggcggcggttatacgttctgcggttgtcgttgccaaaattcgctgactcctttacgcacggtgttgatatcgtcgggggttcccatcagctcgaagcggtagagatagggcacggcgcatttttgcgcgatgacatctccggcacgcccccagccgtcgccaaagttgcgattgccggcggcaatcactccgcggatcagctggcggttatgcacgtcgtttaaaaagcggatcgcctgacgcggtaccgcgccggcggtgccgccgccgccatagctgggaacgatgagaatatagggctcgtctacccgcagatgttcacgctcgttcagcgggatgcgcaccgccggcagccccaggcgctgcacaaagcgatgggtattctccgaacggctggagaagtagacgatgaggctcatgcgctggccgccgtaaaggaggggcgcaggcgattgatcatatccgggcggaagccgctccagcgcagctcaccggcgatcaccaccggcagctggcgaaatccctgctcgcgcagggtgtcggcggcatccggctgctggtcgacgttgaccatttcaaaggccagtccccggctctccatggctcgccgggtggcatggcactgcacgcagtcatttcgagtgtaaataataatgcgcatgattcgtatttccatttaagataacagcacggcgctaaacatagcgtcgaacgtagtgggccattcgataaggaaatactagatgtagttatttaaaacttcaaccactcaatatatagcgtttttggcaagcgagtcccccgccgggatagatcggcggaggaggggggaggctgtgcggaactacaggcgcatggccacggcgaggcggttaaaggcgttcatcagactgacggcgaaggtcagatcgcttatctgacgcggggtaaaatgttcgcgcagcggctggtaaacctcatcttccgcatggctggcggcaatgtcggtgaccgactcggcccaagccagcgccgcgcgttcggccggagtaaagtgggcgcttacccgccagcccgcaagggcatccagtttgctttgcgccatgccgcctttgcgcagcgcctggctatgtttctcaagacagaaggcgcagccgttgatctgcgagacgcgtaaataaaccagctctaccagggcgttgcccagctcgcttttctccagcgcgatgctggcctgtaccagccctttatagacttccgggctcagttcactgaatggctgacgtaattggttcatggtgttctcctctctaagacggcagccaaaatagcattataatggactgcaaaagatagccatattgtgatgaaaaaagcagaccataatggaagcgattaacctcccgctttatcagcgtatcgcccgccagttgaaatcggcgattgaacgtggcgaactgaccccgggcagccgtttgcccgccagccgggtgtacgctcaggagcagggcgtttcccgggcgaccatcgaaaacgcctggggagagctggtcgcccagggatggctcgaacggcgtgggcaggcggggacctttgtcagcgagcggctcagcccgcgccagctggcgccggtaccgccagtgcaaccggccgcgccgacggagccgctgccgtttcagatggggctgccggcgctggatctctttccgcgcgggcagtgggcgcgggtgatggggcgtcggctgcggacgcagtcgcggttcgatcttgcacccggcgatcccggcggcgatccgcttctgcgccaggctatcgtcgattatctacgcctgtcgcgcagtatcgactgtcagccggatcaggtgttgatcaccggcagctatgccgcctccatgaatcttatcctgcgtaccctggcgcagccgggacagcatatgtggatggaagatccggggtatccctttatccggccggtcgtcgaggctgggcagctggcggtggatgcgattcccgtggacgacgaagggatggacgtcggctggggccagcgtcatcacccgcaggcgcgatttgccctgctcacaccagcccatcagagtccgctgggggtcgcgctgtcgcttccccgacgccgccagctgctggcgtgggccgcggagcgcgacgcgtggatcattgaggacgattacgatagcgagtttcgctatcacggcaaaccgctgccgccgctgaaaagccttgatgcgccgcagagggtcatctacgcgggcaccttcagtaagtcgatgttcccggcgctgcgcaccgcctggctggtggtgccgaccccgctggtggcgcgttttcaccagaccgcggagcgccagtcctgcaccgttcccaccctgtggcagcagacgctggcggattttatccagcagggacatttttggcgtcatttgaagaaaatgcgcgccagctatagccagcgtagacagtggctggagtcggctctgcaggcgcagggctttcaggtcacgccgcagctggggggaattcaactggttatgtcggtcagcggcgacgatcggctgctcgcgcggcgggcggttgtggccgggctggcggtgcaggcgctgagcgactggcggattcgccacgcgggcgtggggggattattgatgagttttaccaatatacgttcgccggcgatggctgatggacttgcccgacggctgagagaggcgatcgcgatttgatggcgcttaagtcggggaagcagaaaaacccctgcggccagaggcgcacaggggctgacgcgtatttgttatcttcattgccttccgtaaagctcgcgggctaccgcgcgccaatcgcgcggcggcagccgacgcttaagctattatcgacgtaaattgagcaatacgccaataaataccccgacggcggcggcggcgcccacactgtgccacggtttattgcgcacgtaggtatcggcacagcccagcgcatcgcacgctgcctggcgcgcatccagcgccgcctgctgcacccggttgtggccattaaggcgggcacgagtctcttttaacagcgactgcgctttgacacgcgccgcttccgcttcctctttggcgtcactgccccatgatttcagcacctcttccagcgtatccgctaattggctgacatcgttatgaatatcttcggcgttctcgtcaaaattgttgcggttcacatggttagccatcgttatctcccttaattccatcgagtgagtaagtgtaggacaagattttgaattatgcttactgttgtggtttctggaattttccgaaagcactgtccttaatgaataaggtaaggtcaatgtgcggtaaaagataacgaggaatcagtatgtatttaagacccgatgaggtggcgcgtgttcttgaaaaagccggcttcaccatggatgttgtgacgcaaaaagcgtacggctatcgccgcggcgataattatgtttatgtgaaccgcgaagcgcgcatggggcgaacagcgttagttattcatccggcgttaaaagagcgcagcaatatgctggccgaaccggcttcagatatcaaaacctgtgatcattatgaacagtttccgctgtatttagccggggatgcgcaacaacattatggtattccgcatggatttagctcacgcatggcgcttgagcgttttctgaatgggctatttggcgaagcccagccggcaatgtcgacgaattaatacggcgataggcatttaaggatccaggcgaggcgggctggcgggaagaggcgactggcagagccagtcgctgctaacgcgttggtcaggccttcgcctgctgatagggcgccacgcggaacaggcggcggcaatagtcgaggaagtagccgtaggcggcgcccatcatcatcgataccgccaggttcgagctcaccgcggcgacaatctggtgccagtcagcacccacgctccacagaatagcgacatacaccggcgactgaaaggtgacgtaggccagcacgtcggccatatttttcatccacctggccgggctgatgcgccgggcctgacgcatggcgaaatcgcgataaatcccatagggtacggcaataataatgttgaccgggatcgccaccagacgcgacgataacgactgctcaaacgtcataccagagagaaaaatttcgatcatcatgttgacgacggtgcagtaaaccaccatcgcaaaggtgtctgcaaccgcatgcgggagtgcgcagagaacatcggagtgctcctcgaaaatgaagtcattaacgccgaaaaatgcgcgttggtatagcgtttttgggctgcctgttttgatgtgcgtagagtatatctctgcattaaaagtggcaactagctataaatttttatttatcgcctttttgtcgataaaatactctgcgctggtttgttttttgttcgttacgctacttttattcctgtttttacaaatatcaatatttatcaatgtgttactcttgattgcgaaatcgagactggccgaaggaacggcgcctgatagccaaccatggcgcaacatcacgcgagtgtgtgattccgctctcttttaggattttttatgccgtaagtcgcttttttatggtgaaaaattctgaattgcgaattgtcgttttattcccattttctgattaactattcactgtggccaaaggtatgtatcagtgcggccacgtatgaacagcaggtaacccgctgaccataaagctaatattcctggcgagaacggtggtttttcccgtcattctgccttttttatttattcattctcttttttgcctgtgcttatgaaaaaggctcaggtatttgccaatatagttccaggggataaccgctaatatccaccttatatatttatctggacaaccgaaggctggaaataaataaacgtttctattacacttgccgcgttgtatcttttaatttgctatttggaattttttaattttatgtcttcaatgttacacaaactgaataatatccgttcactgcgtgccctgtcccgtgaattctccattgacgtgcttgaagagatgctggaaaagctcaggatcgtcactgaagaaaaacgtacgcaacagcagcaggcagctcagcagcaggctgaatatcaggagaaagtgaatacctggcttgaactgatgcgcgccgacggtatttctcctgacgagctggtggccgatattcagccgccaaaggcgggaggcaaaaagcgtcaaccgcgcccggcgaaatatcgttataccgatcatactggcgcagagaaaacctggaccggacagggaagaatgccgaagccgattgccgaggctgtcgcccagggtaaatcgctggatagctttttaatttaacgccttcgggccagcgccagcccggtggtgagagacccaccggcctggccttacgactttaagcgaggggctttagcagacgccgaagtctccctcttcctgatacggcgtgacctcgtccgacttcagcgaatagcgctctccctgctcctgtgcggcctgaaccaccaccagttgctccccttgcacttccaccactttcagttttggtccgcccgctcggggttgtaccagatcgccgacagcaaacataattcactcctcactgttaacaccatggataaacctaaaccatagctcaacgcccgctcactgaacaccgggcgtgctgttttttgttaaaacaatttggagttatatgtattaacattgttaatgttttgctggcgccataccgctgctgagaaagggggacggcgagggtagggttaccaccaatcaggtcaggaaagacaccatgaagtatatcattctgttgatcattgttattgctgtactgtatgtccattaccgcggacgggtgcgctatcgtttctggcggcagctctccgaccattccacatttaccgcgccgctgaatggatttatgtatttattttcccgcgtgccgaatacgccttatctgcggccggagatgtttcccgagctggcgatattgcagcaaaactggcaggttattcgcgacgaaggtctccaccttcagcagctggagcagattaaagcggccgataaatataacgatgccgggtttaactcatttttcaaaaccggctggaaacgcttttatctgaaatggtatgaggatgcccatccttccgccagccagctctgtccgcaaactaccgcgctgctgcgcgatatcccgtcggtgaaagcggccatgtttgccactctgccggacggtagccgtctgccgcgccatcgcgacccctacgccggctcgctacgctttcatctgggcctggcaacgccgaacgatgaccgctgctttattgaggtggatggccagcgttacagctggcgcgatggagaaggcgtgctgtttgatgagacctatatccactatgcggaaaataccagtggtgagaatcgcctgattctgttctgcgatattgaacggccgatgcgctaccgctgggcgcagaaagttaaccactggctgggacgtcatctgatgagcgccgcttcggcgcccaacgatatcggcgatcgcaccggcgggattaaccgggcgtttcgctatatttaccagatccgtattgttggtaagcggttgaaaaaatggaataagacggtctattacatcgtcaaatggctgctcttcggcggcattgcctggcttatctggagcgcgttttaaccccctggcgccggttccacggcatggtcgccagcagacgcgccatgccgcaaaagccggttacgccggcgaaggtgagcccggcgccgaccgcgccgctgagcaggaaaaagccgccgttaacggtatagcccagcagcacccccagtaaaatcaggacgccagcggcaatttgcacctggcgcatcagcggcagcggctgcgatgaatcttccactaccggcaaccccgcggctttccacgcctgaaatcctcctgccagcagacaaggctgcgccggcgcggcggccgcggccagacgaatcgcattattctgcgtccgggaacccgcctggcagtgaaagatgaccgtctctccggcccgggcattgaggggcgcaccgctggtcagagtggcgagcggcaccagctcggcatcggggatatgttcgcgcgcatattcatccgcatcgcggatatcaatcagtctggcgccctgggcaatctgcgcctgggcctcggcgggagttaaggtggcgatggtcataggatcctcacgggcaatagagcgttttcagcgtattgatcacctgctgtaccgcagggtgggtgatgaaatagtggatacgctgggcgtcgcgctcgctgtcgatcagcccctcgtcacgcatccgcgcgaggtgttgcgaggtggcggaggggctcagccctgtagcccgggcgagttcgccggcgctggccctgggcgcatcgcacagcatgcacaggatcagcaatcggtgaggattgctcatcgctttcatcagcgcggcggcttctccggcgcgggcctgcaggtcttcaggtgtggtcatttattttagctttgtctaaatttagataactctaaaataaaaaggccgccagcgccagcacaatttctccacgactcaggccggaacggcgagccgggcaatctgcgcccgggcgctggcgatcccggcgtcgcgaccatgcgggcgattgtccagcccttcggcatagataaattccacctcctggatccccatcagccccagtaccgcgcgcagatagggcgtgacggcgtcggtagtttctccctggtgaataccgccgcggctgctgacgaccaccgcccggacgccctccaccagcccctgcggccagctctcggtgtagcgaaaggtttcccgcgcccgcgccacgaggtcgaaccatttttttagatcggtcgggacgttgaggttatacatcggcgcgccgatcaccagcaggtcgctggcctttaactcggcgataagctggtcggagagggcgaccgcctcgcggatagcaggctgcggatccactgccccgcgcagggcggcgaacagggggcgatccagcgttggcagcgccatggcgctgagatcgtgttcgatgagccgatcgccgtgtcccgccgcctggcgcgccgcgagaaattcgttaatcaactgattggtcagggatgtttcgccattaatgctggattttaaaaccagaacgttagccatgatgagtgcctcaaatgaaagatagaagcaaagactaacactgtcttttttgtctcaggagtgacattatttttccctattgtatcccgtaaggaaccaatctgtgcgcgacgatctgaatgcgatcccggtatttgtcaccgtggtcgagagcggcaactttgccagcgcggcggcgatcctccatgtgacgcgttcggcggtgggaaaaaccattgcccggctggaagcgcgtctcggcgtggcgttattccagcgtaccacccgacggcaactgctgacggaagagggggagcaattctatctccagtgccgggaagcgctggagcgcatccgcgaggccgaagagacgctgcagcgcggcaaagatgaggtgcaggggcggctgcgggtgtcgctgccggtgctgtttggccagcgctgcgtggcaccgctgctgttccgcctcagccagcgctatccgttactgaagctcgagctccactacagcgaccggcaggtcaatctgctggaggaggggtttgatcttgcggtgcgtatcgggagcctggccgataccgggtcgctgcgggcccgtgcgctgggagagcacggcatggtgctgtgcgcggcggcggagtacctgcgccagcagccagcgccgcagactattgccgggttgaacgagcaccgtaccctcggctatctgcacaacggccagctgcaaaaatggcaactgtatgacccgcagcagggcgaagtgcgcttcagtccgcagacgtggctgatacaggatgattttgccgccatcgcggcggcagtgcagcaggggatgggcatcgcctggctgccggactggctggtggcgcaggcgcttgccgatgggacattgcagcaggtgttggcgcccagcgctcaggtgcgtttcgccatccacgcggtatggccggaggggccgtggctgccgcaaaaaacgcgggcggcgatcgatgccctgcgggaagggctgcctcttaccgcaacacctggttagcgcagagagaaataaccgccatctatggcggcggaggttttccgacagcgtgcaagctaccggcgcgctttacgccatagcctcagcgacgaggccgtccggcacgggcggcacggcggtacaacgtgctgcgggcgatacccagtatctgcgccgcccggctgacgttgccgttgaccctggccagggtatcgacaatcaactgctcatcatgggcctgcaatcccccgcgcggcaacggcgcaggcgcggcgcgatacgcctccggcagcgcgtcgggcgtcagcgtggcgccctcatcggcgagagccagcattaccttcaggacgctctgcagctggcgtacgtttcccggccacggcagctggctgaggtgaaccagcagcgcgtttgaaagcgtcacccggcgtgaagcaccgcccaggtcgtgccacagggtggcgataaaggtttccagcgccggccactcgcgcagcggaggcagcgccagggcgtattcccgcaggcgccacagcagatcttcacggaattctccggcgctgacccgctgggtcaggttgcggtgggtggcgcagatcaaggcgaaattcaccggcacgctgcggctggcgcccagcggagcgacctctttctcctgcaggacgcgcaggaggcgggtctgcagcgccagcggcatatcgccgatctcatcaagaaacagcaccccgccgtcagcctcgcggattttaccgatatagccatttttgctggcgccggtaaacgcccccggctggtagccgaagagctcggattcgatcagcgattccggaatggcggcacagttaatggcgacaaatttaccgctgcgccagcggctgtgccggtgcaacgtgcggctgacatactctttgccgctgccggtttctccttcaatgcacagggcgatgccggcgttgagcagccgcagcagcttttcgccttcgcgcggactggtaaaggggagatgcatggccggcggggcgcttaccgccacccggcggcgggtaggctcccgcaggcgatagtggtagcggccctgcggcgtggtcagcggcagcgggacgctgaccgccgtttgcgtcagcgtcggaaaaagcgaggcaaaggtgagctggccaaactgcgccgcgctcaggccgaactcgcgcatcgccagccggttgccggcggtgaggacgttgtcggaaaagaccagcagcagctcctcgacgctgtcgagtttgtccacctgccggtgcaggctcatcagccactgctcaggatgcagactctgtttcacccacagatattcaatttgctttgccgccgcttttacccagccaaaggtgtgctggtggggaaaattcgccgggccggagatatccagcaccccggcgatgcttccgtccggtcgctggagcggcatcgccgcgcagtacagattctggttgcgggtaagaaagtgctgacggccatcgatctcgcagccatcgtcaatcgccagcgcggtgccgatggcgttggtcccgcgcccgctttcactccacagattgccgggagccagcgccacgcgctgggccttttgcagcgcctgggtatcgccgagagtatgcagcaccaggccgtcggggtcggaaaggatcaccaccgactgcaggtctgcgacctggcgcgacagggcttccaccaccggctgcgccagatgctgcaggccgcggtggctggcgagccggtccgccagctcgccggcgccgaggcggggaaaatcctcggtggcgggatccagcccgtagcgctggcagcgagaccacgaatcgctcagcaggggattcgcattaacctctggtgcgagaagaaagggattgcctgccacagggcacctctgggtcgatgttgctgtgttgcaatattgtagccatttggtttatttggtgttgcgatttgcaacacataagtggaaacccgtgcgacagtggctgaccatctgctcggttagtgaaggcaacgtattaataaataaaaaatatttaaagaaaataaaaaactggcataacccctgcaaagtgagaagcgttcggcggcaaatttaaaaaatcaatatgccgctgcgtctcaaccctacagaaggagatttgcgatgcgttatgcacatcctggccagcccggcgccgtggtttcatttaaatcggcttacggcaactttattgacggtagatttgtcgagccgctgagcggtgaattctttatgaatacttcgccggtcgacggcagcaacattgcgcagtttccccgctcggatgccagagacattgacttcgccctcgacgccgcccatcgcgcggcgccggcgtggggtaaaacctcagtgcaacagcgctccaggctgctgctgcaggtcgccgatcgtattgaacagcatctggaatatctggcggtggcggagagctgggacaatgggaaaccgatccgcgaaaccctgaatgccgacctgccgctggcggtggatcattttcgctacttcgccggctgcctgcgcgctcaggagggaagcaccgccgagattgacgaaaccacggtggcctatcatttccatgaaccgctgggggtggtcgggcagattatcccgtggaacttcccgctgctgatggccgcgtggaagctggccccggccctggcggcggggaactgcgtggtgctcaaaccggcggaacagacgccgctaagcattaccctgctgctggagctgatcggcgatctgttcccggccggggtgcttaacgtggtgcagggtttcggcaaagaggcgggcgaggcgctggccaccagcaagcgtatcgccaagctggcgtttaccggctccacgccggtcgggcggcatattctcgcctgcgcggcggaaaatattatcccctgcaccgtcgagctgggggggaaatcgcccaacatctacttcgccgacgtgatggacggagaagaggaatttattgagaaggcggtggaggggctggtgctcggcttcttcaaccagggtgaggtctgtacctgcccgtcgcgggcgctgatccatgaatccatctatgagccctttatggcacgggtcatggagaaggtggcgcagatccgccgcggcgatccgttagataccgacaccatgatcggcgctcaggcttcccgccagcagttcgacaagatcctctcctatattcagattgcccgggaagagggtgggcaaattctgaccggaggcgagcgggcggctatcgcgccggcgctggataatggtttttatattcagcccacgctgattaaaggtcgcaacgatatgcgttccttccaggaggagatctttgggccggtgatcggggtgaccacctttaaggacgaagcggaagcgctggctatcgccaatgagacccagtttggtctcggcgccggggtgtggacgcgggataccaacctcgcctatcgcatgggtcgcggcattaaagccggtcgcgtgtggaccaactgctatcatgtctacccggcgcatgcggcgttcggcggctataaacagtccggcgtcgggcgggaaacgcacaagatggcgctggatgcctatcagcaaaccaaaaacctgctggtgagctacggcaccgcgccgctgggcctgttctgaagtccatctcatttctgaccgatcctcagtccgcaatccattcgggttgcggattttttttacttcaaaataaccatgtgaagatggtggctattttgccggcggcagcgcccatgtatttatgtcacttatgtattggctttcacttgaaaataaaaacacttccataataagggattagccggtggaggtggcgcaccctggcgtcgtttgtgtagaaattatgaatattaataccaggaaaattcctaatttttgtgtacgctctgacgagcgcacaataaaacaagacgaatttttgaacaattgtctttaaatttgttaattgaattgatctgttgttgtttaaaggtatttgaatttcttttgtatagatatgtaaattaacattgaaaagccatttcaaaaattaaatatatggcgaacatagctattaacttatagttaacatctccccgggttgccttttgatacttcgggtaatatatttatttcgcacatcaaaataactcttttttcttctgtttgttattcatggccatctattggcgaaataaggcagagtagagggggatgtgcctaatatcctgcggaaggaacgcaacgtacatttacagggaggagctgacgagccgtttcgcgatagctttggggctattgtcgatgatggaaaatatgttcgttaacgatgagataaataatgaaaaaacaacctcgctttataaccatcctcataggagcgctgctttctggcgtagccttgcaggctaccgcggccaacactatcaatcctgactcgggcaccagttcggaaggcgccggcgggcaggtcatcttcaatgggtcaatcaccgacagctcttgcaacgtcgatagtagttctaatggccagaaggttgatctgggcaaatgggccagcaactattttaccggcactggttttgaaaccaccaaaacccccttccatatcaaagtgaaagattgcccggccagcgtgactacggtcgccgtgctgtttgacggcgcgcgcgatcagtctgataactccctgctggccatcaacggcggcgccagcggcgtagcgattaagctgtatgagcacgatcggtcgacggctgtcagcctcggtaaaacgtcagccaaacagacggtcactccgggtaccagcggcggcaccggctctgccgacctcgagttttacgccgactatatctccaccgcggcgaccgtgacggcaggtaaagccgacggtacagctaatttcaatatgatttataactgatctaattgcgcgttattcagagtcagcccactgcgtcttgattaattacagatagctaatgtgttaattgtcacgaagtcacgaaatatattcgtgacggtatagttgtttttgctaattatcccgtcgagtactggctctgttattcactgctttattttgttgtctgttcaacttttacctgatggtaagtcatgatgaagaaaataattgccgttgcggcttttctgctgtgcaccacggcagcgcaggccggtattgtcatgggtggaacccgtgtgatttatcaggaagggaagcgtgaagccgctatttcagtcaccaatgccgatacccatacgccctatctggtgcagtcgtgggtggaaaattacgcggaaaacgataaggccagggtgcccttcattgtaacgccgcccttgttccgtctcgatccggagcaaaataacgttctgcggattaactttattggcgcctcgctgccccgcgaccgtgaatcggtcttctggctgaacgtcaaaagtatcgccccgacgcgtcagggcgaggtgaataagctgcaggtgaatattaaatcgaaattcaaaatcttctatcgccccaacgacctggcgggcgacccggcaaaggcctggcagcagctgaagtttagccagtccggcggtcggctgacggtgataaatcccactccctacttcgtctctttttacgccgtcgaagtgggcgggcaaagcatcgacgatcccggcatggtggctcccttcggcgagaaaacgtggccggtgagcgggcacggcaccgtcaaatggcgggcgattaacgactacggcggcgtcagcgatttcgcccagcagtaattcccctttttgatgagcttaccggacggcgccagcatgaaaagaataacaacagccagggtgcgggagtatgccttgttgcccgttaccgccgggcgggcggtggcgctggcgacggtgccgacgatgatgttttgtctcagtccgttgagccgggcgctggccgacgactattttgacccggcggcgctggagtttgctgacccgcagcagcaaacctccgatctgcactacttcgccaaacccggcggccagcagccggggacttatcctgtcaccgtggtggttaatgaccaggagctgggtcaggctgatatcacgtttgttgacgatggcgggcagctgcgcccggtgctgacgcccggtcagctggcggagtatggcgtcaacgtcagcgcgtttcccgcctttcaagcgctgcatgaaggcgaaaccttcacccggatcgagaagtttattcccgacgccagcagtcggttcagcttcgctaaccagcgcctgacgctgagtattccccaggcggcgatgaacgtgcaaagccgcggctatgtcgatccgtcgcgctgggacgatggcgtgccggccgcgtttgtcgattactatttttccggcgcgcaaataaagaacgccgacgaaggggagagcagccgctcaaactatctcaatttacgcagcggcctcaacctgggcgcctggcgactgcgcaacatctcctcaatgcagtatgaccagcagcgccggcactgggatacccagagcacctggctgcagcgcgatgtccgctcgctgaagagcttgctgcggatcggcgatacctataccaccggcgatgtgtttgacagcatacagtttcgcggcgtccagctgatgtctgacgatgaaatgctcccggacagccagcgcggctttgcccccaccattcgtggcgtggcgcacagcaatgccaaagtgaccgtctctcagcacgggtatgtgatctacgagacctttgtgtcgccgggggcgttcgccatcagcgatctctaccccacctcgcagagcggcgatctggaggtgaaggtgaccgagagcaatggcgcggtgcgtacctttacccagccctattccgcggtgccatatatgctgcgcgaagggcgcggcaaattcagtctcagcgccggccgctaccactccgggggggagtcggtgcgctcgccggaatttctgcagggcactttgttctacggtttgacggcgggattcaccctctacggtggtacgcagctggcccgggactatcaggcgtgggcgctgggcctgggccgcggttttggcgagttcggatcgctgggaggggatgtcacccaggccgtcacccgtacgccgtcgggcaagcgctatacgggccattcgctgcgcgctcagtatcagaaaaattttgtcagctcgggcactgcgttcagcctcgccagctatcgctactcgtcaagcggctattacgattttgccgaagccagcgcccttgaaagcgcccaggggcaagtagacaaccggcgtcgccgggaagagctgtcggtgtcgcaaagccttggtggcctgggcagtctggcggtttccgcctggtcgcaggagtactggcatcggcagagtcgggatgagacggtgcaccttgggttctacagcgcctggaaagggatctcctggggcgtgggctattactacacccgcgccagcggccagcaaaaaaatgaccgctcctggtcattcaatatcaatattccgctgggtggtccgctgtccgacagcgcggtgagctacaacaccacctcggacagcaatggctatacctcgcagcagatgtcgctgtatggcgcggtgccgacgcggccaaatctgttctactcggttcagcaaggttatggcaaccagggacgaggcagcaacagcagcgcctccctggactaccacggcggcttcggcaacgcccagatcggctatcgccatgacgccgccagcaaccagttgacctggggaggcgccggctcggtggtcgcgcatccgcacggcgtcaccttcggccagacggtgggtgagagcttcgccatcgtccgggcgccgggggccgccggcgtggcggtgcaaaacggcaacaatgtgcacaccgactggcgcggctatgccgtggtgccctctctgaccgcctaccggaaaaatgtcattaccctcgatacggagtcgatggccgacgacaccgacgtcgaccagcaggggcagaccgtgatccccggcggcggcgcggtggtgatggccaactaccagacccacattggcaaccgggtgctgtttaccctgcgtaatgcccaggggccgctaccgtttggcgccagtgcgcggctggtcgaggaggaggagagcggcaatccgccgggcggcatggtggccgacggcggccaggtgtatctcagcggtgtgccgcaggagggaaccctggcggtgagttggatcgtcaacaaccagtcgcagagctgcacgctgcattttcatcttccggataacccacagcagagtctgaatacggtgaaaaccgtctccggactgtgccaggcacgctgaggcggctatgaaatctgtttttcgtctacttcctttcctctttctgctggggctgagcgcctatcttcccggcgtgcgggctgaaacctgccgcgcaaatatcggccagaccacggtcaatattcctaatatcaagtatttacccacgctgccggtcaatacacagatgaccagcgcgatggcggataacggcagcgggatccctttttcctgcgacctgcagctgccgacggcgagcgccaaacgcatcgtctataagcagctgaaaaccggcggctcgccgatggtgattaacggacagcatgtctaccccagcgctatcgacggcattggttacgccctcagcttccagtgcgccggcggcccgatgcgtgccatcgatggcagccactccgccggcggcgagtcggtggtggtatgcgacagtgcgacgctcccggcgctgatgacgcagcagcaaaccacggtgaggattgcggtaaccttctataaaaccggaacggtgcaactggcggacgggacgcataccaactcgccgccgctgccgcaggtgggggagatgaccattgaacagcaggccagcgcaagcgccagctttgtcgccagcgcgccggtcagcatcgatatcgccgccctgaatgtggacattggcagcagcggcagctgccaggtagcgacatcgacgacccaggtcagtctgggtacggttaaccggggggagtttcatggcaaagggactaccggcggccaggcgaagcgcttttcgattccggtcttctgtccgacgccgaccgacgtgcgcatcggctttttcggcgtcagcgtggagagcgataccctggccctgagccaggccagcaacagcgccagcggcgtcggcgtgaagctgacctacggcaataaccccggtgcggcagtgcccgacggcaccagcgttaagatcaatgaggccagcaacttgccgatcctgaaaagggtgaccggcgccagcgccggtaccgccgaggcgatcaatttcaacgcccagtatgtgcagactgacgccacggtgggagccggtacggccaacagcatggtgactttcgccctggagtataactagcctggggcggcgttattcaaaggtcacggtgattttggcggtcgcggaaaaaggccccagcttcggcgttctcgacaaccagagcagccccgccgtataggtgctcgcgagggtcgcgcccgttgccagcgtaaagtgaatcggagcattcatctcaataaggggatgcatgctggcgtttggcgagatggcaatgccgaagccgctgtccggctgcggcaaaataatggcgctctcctgtatcgtattagtggtgctaaacgtagcaagcataggttcggtcccgcaatcactgccgttaccctgcttgaccagaccataggtgacggtaaaggggcgtgttttttcatagtagcccggtcgggcgttaccggcaggaatatcgccaaagttaatttcgcttggcgaaatagataccgtggggacgcaggccattgttcggatacggttcaggccggtaatgaaaagattatagttggcgccagcggtgccgttgcgtagaccgccttggccatctacctgaaaaagcgacaattttaggttatcgtctattttaccttccccggtcactctgcggcccgtcgagatgatatagacctggtaaaccaggctgaatgtctgcccaatggccggggacttacaggtattcccgcttttatcacacagcgtcgccgggccaatctccaccgattttttattttgtagcagatagtcgatgccgttgtaagtaatgcctacctggataaagtcgggcaagctgctggctttattttccggatccagccagaaataggcgctttcaccgttcggaaaattatcggtatcttcgcaactgaaggtggcggtaatagggctggagacccatatctttttattggcaataagctcgctgctggagactttaatgatgctctcgatattcacgacttcgctgatcgtggacgaggtggtcttgcaggtcagcgcctgcgccgggaaggcgctcagcatgaacagaacggaaagccatgtcagaaataacgtatcgctaagtcggcgcataattacctcgagggggttactgtgcagattaaggataattcacgccaggccgtcgcctgctgaggctcctggcgcagttcgggcagggtgatttcgcagctttgctggtgcgtttcgccccatttcatctgcagcttttcgcctgaatcgactccgctgacgtaaacttctcctcccgggccgaccagaccattgctgatcccactggcgcgatagagctgtgcgcccaatggtggatagctgccgtcggcgagggtggtatggatcagcacgctatatccccggaatgtatcaaagcgcacccgggtgattgccccgcgggtaggcacggtatccgctaccgcgttagggacatcaagaaaggtatcgaagtcctgagggttgagcacgacagaattgacccgatagggaacgctttgtggtacgacagcgtagccgaagggatcgatgcgcacgccggtctgattctctatccctaccccctgagcgtctttggcctccactagcgcaaaggttgagcccagcggttgcgagagggtaacgccgccgcggtgcgccaccacgccgccgctcagattcagactcgcctgacgatggcttttgctgtaggcgtagccagtatacagattaccgtactggccgagataacccaggctggcgctgttggtgctaaggctggtgtcatcataggcgctggtgacggcccagctcaggcgaccatcatcgagcagcgtgccgtttaccccagcctgcccggacgtgccagacgatttactgtgggcgagggtaaatgcggtattgatccggcgatcttcttgcagagtaaaagggatggaaacgcgcagtgttatgctattgtcgtcatgggtgaagtggctgcgcgtattctgatagtacagaccatagttcacgttatggatagtgctgttaaagcccgcctgcagcgagatatcgcttcctgagctattccagtaattttgctggctgaagttaaggaagaaagcgctgttcttaccgagagtttgccgggcagaaatatcaaagcgatgctttttattataaaaccaggacgtgtaatagtgttggggagcgcttgcctgccagctttcgtcttcgtcagagggccagtaatcattttcgtacaggccattgtgccagcgtcgacgctcgttaaccgcatcgctgaggctataataacctgcggttgagtaacggtagcccgcgatttgaaagtcggtcttgctcgacaaaaaggatttagcatacagaaaacgcacgctccctccctgcttgcgctggccattcgccagcgtcgttcccgccagcgtatagtcggctgagagggcgccaatctcccccagattgctaccgacgccaaaggcgccggcgcgatagttctccgctgcaagggcgccaccgtacagtgtgaaggtattattcaggccataagagagcgagctttgcatcagggcgggggcatagccgtcagcgccgtcatgatacttacccgccgacagctgataattccattggcctgcccgcaccagctgtggcagggtggtgtaggcgacagtaaaggtcgtctggctaccgtcggcttcaatgacggttacgtagaaatcaccgctgcggttaacggcgctgatatcatttagctcaaagggaccggctgggacgttctcgctgtaaatcagatagttgttctgccgaacttccacccgggcattgctgttggccacaccgcgaatgaccggcgcgaagccggtctggctgctggggcgcatttcggcatcggtgccaagctgtacgccgcgaaactggacgctatcgaagacgctgttgtcggtactggtctggccgacgacaagccggctgcgccagggaatgatgttcgtttccgcccaactggcgatgctttgccacttatccgcctggccgctgaacttattccagtaggcattattgcgcaatcgccacgatgcaatattgatcccgctgtttagcgaaagatattgatactggtggctgcccccgtcgccattattggcatcggtagaatagctgtagttgacgaaagcagcgttaataccttcatcaaagcgcatgggggaaacatagtcacggggatagtgctcgatatattgctgagggatatgaatgatcagctgatgattagcgatatccagctgttgctctgcctggcggatcgtctgcgacagcgcgaaacagggctggtggtcatcgtcaatcttgacgccatagcggatatattccgccgcgctcaggcagggggccaacccgccatgtgcgctatcctctgagaagcgaacggggcggctatccaccagcagatcgttaatgtaaatattaacgtcataggtgcccggcatgacgtcgccatcgctggcgacaaactgattaaaagccagcgggtcgatgccgttcacaaactgggcattatagcgttccgtgctgtctgccggtaacgtgatggagattaaccatgcgctggcaaaatagcgtaatttactatcgtccatcactctatctccctaaagaggtgcgacgtttatttttttattggaatatcaacaacggcgccgtaatcattaatatatttcattttatgcaagcgctgcatgctggcgatattgacagcgtgatgactgtacggcagcaacataaagtttttcagaggatagattttgcctttgttgtcgatcgcctcggcattaataaccgtaatatgcagtggactgttgttagtaaaagataacgtgttagcgctttgctgccactgcagattttcaacggctttgggcagcgatgtggcaatcccttgcgggcgataaaatagttttaatcgggtgcgaatcgcgaactgcaggatattattttcctcaggcgcaggagggacctcctgaatattcacccaaaacagactttccctgtcggcaggaagaccggttcctgagtaaataaagcgcagttgtgccgattgctcggggcgtaatttgaccaggggcggcgttgccacaatgggtaagccgctgctgggggtctccggacccgtatcaagctaggtctggacgatatagtttttgctgcttcggttgttaattttcagactggccgatttatctttgcccgaataaataacccgtgaggcatcgatggtaatggccgcctgggtctgaaaagccaaagcgcctatgatcactgccagcagcgttttcatatcttaccccttatccgcgtcgtgccgtccctggccaggcattattgctgtataatggtaaaccgggcggtcgcattgccgtcgccagcttcggcgttgtctttatcccaggtgtagtaataggctttcaggttgaaggtaccggtgccatcggcattgatcgtaatactcgggtcgacgtcgggatcgaaaggtttatcgagcgtgaccggggtgttattgcggtcggttagcttaatgccgactttttctgccgtaggattacccgcatcgagagccagtatgttagtgctaggcgcatcgagggctggagcaccgtcgagcacaataaagtacgtgcccgcgtcacaatttttgacgctaatattgaccccaacttctggcccggtgccattggtatcattttttaatttagacagcggaacagagcccatcttaactacaatgacaccgttctcattgtcgcttactagcgtgcaagatgagttgacaattttaccgataaaattcagcgtaccgtccgccgcggcggcatagtgtgaggtcaagccgacgagtgccattgccaggcaaagtgatttcattttcatagccaattccttctgttgtgacccagggaagctaatagccaggcatactcattgacgctgcataagccgttagctctgttgttgtgatagccataaagcgaacttatccctcctccagggagtgcaggaaatgatacaggcctgcaatattgcggacattaagtttctggtagatgtttctccgatagtgactgatcatcatattgctaaggtcggtggcctgagcaattttcttattatttaaacctgagatgatataggggagaagagagtcctcctgtttcgtaagtttaatattgacacaactgtccagcgagctaattgattttctgaacactttaatacagcgatgatcagacgcattctgtaagtatttctgcagccgttgggtaacatctatataatcaagcacgatcgtcgaaatagagtttatgataatgttttcgactggatcggcaagaatctcacttttaacgacaaaaacgatatcgccatgaatgatcttttttttacgatagagcagtgcggctaattgttgaatgtccgggtggctatagtccacgataatggttctggctatggttagacttttatcattcacgtcagaaatattatccagaaacaatgtttgactataccgacgttgagcactcatggtcatgttaaccagagaccggatgccgttaataaaaaatttattggcggaaatgataataatcataatgtatttccttatacactgcttctgtaaccaagtattactgctggagaggaggggagtaaataagatgataagcaggatcattagaaaaatcctaatgaaagatgttgcatgaagtgtttttacttattaatcaggaggttataatttaagattcaactattaacgcataagaggaaagtaaaataaacgataataaataatatattaaacgtatggccaggaataaaatatgaatgcgctgcggggcattttactgaaagtcaaaacaaccagcaagcttacagcgagaaagaggattaattaacgttttgccccacgtcgggttgtatgtcccggtgtttaaaaataggatgaatgccctggctcgcgcggcggatactgtgactgatgcggccggtcactctggcatgaaaaacgataactttaaggatggcgaaatgagactgacggtggggctggcgctgacgctggcgataatgacctgcggcgcccaggcgcgcgatatgcaatccatcgagcacagcggtgaactgaaggtgggcgtgccgggcgattacgcgccgctggcgtttcgcaatgccgccggcgaactgcagggctatgacgtggacatggcccgcgatctcgggcgcacgctcggactcaaggtgagcttcgtctacaccagctggcccgcgctcgccgccgatctgcaggcggacaagtttgatattgcgatgggtggggttaccgagaccccggcgcgggcgcaagccttcgccctcagccatccggtggtggcgaacggaaaaatcgccttagccaactgccaggccgccccgcggctcggttcgctggaaaaaattgaccgtccggacgtgaaagtgatcgtcaaccctggcggcacaaaccagagttttgtcgatgaacacatcaagcaggcgcaaattattcgcgtgcagaacaatgtcgataacctgcaggcgctgcggcagaaaacggccgatatgatggtgaccgatctgattgaaggcgactattaccagagcaaagagcccggcgtgttctgcgttgctaacgaaacaccgttcgccggtaccgccagcaacaaggtgtatatgatgagtaaagataacccggcgctgctgaagaaagtgaatcagtggctggatagccaggacaaagaggttctcaaacggaagtggaaaattcgcggttaaccgcggcggcgcgccaccgccggcagacacgcccggcggtggctatcgtctacgattagcgctgcggcgacagcgcctgtcgcgccagaccgcgaaagtagcaggcgtagcccagggtggcggtcaggcacagcatatagccaaacgactcgctgccttcctcgaccgtattttttaccacccgggcgtagttctcttccagcacggcgtaccacaggccgtgcatgccaaacagccgcgagaagaccagaatcgccagcaggccgctaatcatcatcccgtaatacggggtgcgggtatactccgccagctgcgacagggtctgacgcagatggcgcaacggcaacagcagcgaccccgcggtggccagcagggcaaaccacacccagctgccgtgggagagtaaatcaaacaggccatccagctcacggatcagcatggcgagaaagaagccgccgatgaggatattgctatagcgcaagtgggcatatttccgcgccagcagcagatgaaccagcacgataacggccagcacgctctcctggaccacttcggtgagcgacacctccgggatgtcgttgccaaacacccgaatatccacccacaggcagagtaccgcgagggcggccgcgaccgccgcgccgaaaaagaaaagcaagcttcgtaacagagacattaacaccacaacttatgcttaaaacaaatatcataagttctgggaatacatgttcctgttcactttgtgcgactttgccgcgtttttttaacattttgcgctttttagcgcccgggaaggcggcaggggagggggctcccctgcataaaggggattcagagaatatcatccaccacgccgccatcgacgcgcagcgcggcgccggaggtggctgacgcctgcggcgagcagacgtagaccaccatattggcgacctctgccaccgaggccgcccgctggatcaccgagctcggacgatgggtcatgacaaacgctttcgccagttcctccagcgactgaccggttttcgccacttcgtctttcagcatttcggcaaagccgtcggaaatcgttggccctggcagaacgctgttaacggtcactccgctgccggcgacatatttcgccaggccgcgggccagcgagagctgcgcggtcttggtgacgccatagtggatcatgtccgccgggatattgcgcgccgattccgaggagataaacaccacccgcccccagcctttgctgaccatcgccgggagcagcccccgcgacaggcgcacgccggacatgacgttggtctgccagtagttgtcccaggtcgcgtcgtcggtggcgtagaaatcctgcgggccatagatcccggcgttattgaccagaatatcgacgccggtcacggcccgcagcagctgcgctgcgccgtcggcgtcgctgaggtcggcgatggcgggacgcgccttcgcgcccggcacctcattttgcagccgggcgatcgcggcgttcacgctctgctcgctgcgcccgttaaggatgacctctgcgccgctctccgccaggcctttggcgatggcgaagccaatacccgccgtggaggcggtgaccagcgcgacttttcccgctaaatcaatcttcatgttcatgccttctggttgtggatctcctattaagcgtagcagcggcgatatagccggggatcagtaaccggcgtgcttattgaccaggtttttcagcggcagcccgcggcgctggcgctgaatgttctccagcagctggcgggcgatcacctcggcagaggccgcagatgccatatgtggggtgatgaccacctgcggatggcgccacagcggctcgtccgccggcaatggctcctgcgggaagacgtcgagcaccgccccggcgagctggccgctctccagcgccgccagcacatcctcattgaccatatgctctccgcggccgcagttgattaacaccgccccggcggggagccggctgaacagcggcgcggcgaggataccccgggtctgcgcggtgagcggcaggaggttaatcagcccgtcaagcgacccaagaaagtggtcgagcgcctcctcgccgcgatagcaggtgacgccagccagctgcttttcactgcgcgaccagccggagacccgatagccgaggcgggccagctggtcggcgatatagccgccaatttcgccgagccccataatgccgatatggaagtcggcggcggcgcgctggggatagagcttccaggtttgggtccgctggtgggccagcgcccggtcgaaatggcgctgaaaccacaggacgctccacagggcatattcgaacatgccgtggcgaaaatcttcatcgatcacccggcacagcgggatctcgctggcgaacagcgcgggcggcagatgatcgaccccggcggacgcggcctggatcagcttcagccccggcgaacgggtcaacagctgcgggtccgggaaccagcagctggcgtactgggcgtcgcgcgccgtctggtgatggggcagaagcgccgtgacgtcgggaaactgctgcagggcggcgcagatatcgcgggcgaaatccgcgtcgttacaatccaccacgatagtgatatcagacataggcgttagtctttgtaagaggtatcgagacggtcaagacggcgcagccacgcctgccagacctgttgacgttcatgctccacgcccatcagctgctcgcaggcgtgctggctaaggtgcggggcgatggtgtggatcgggctgagggccgccagctgggcggcggccatctggatctcgcaggcgcggttcaggtagtacatgatgtaaaacgcgtcagccacggtgcggcccaccgacagcaggccgtggctctgcaggatcatagcgatattattccccagcgagcgctggatgcgcgcccgttcgtcgaggtcaaaggccaccccttcatagggatggtagccgacgcgctggtaaaactcggtgctgatctggttgagctgcagcaggccatcctcgcaggcggccaccgccatccccggcagcgtatgggtgtggatcacgcagtgggcgtcttcccgggccatatgcaccgcgctatggatggtaaagcccgccgagttagccggcgcgtcgcccgctacgaccttgccctgcatatccactacgatcaggttgctggcggtgacttcgtcaaacatcatgccgaagggattaattaaaaaacgcggctcgccgtcgccgggcaggcgcacggagaagtgagtgtagagggtatcctcccagccgaacagcgccgccagccggtaggcggcggccagctgctggcgcaggtgttgctcagttgccatttagcgtactcccataaattcacggattcgttgcagagaaggcgcctccagcgggctgcggatcacctgcggggcgatatcggcctgcaccacgccgttctccatcagcaccacgcggtcggaaatcgacagggcgaagtccatctcgtgagtgacaatcaacatggtcatgccttcgcgggccagcgactgaatgaccttcagcacttcgcctaccagctcgggatccagcgccgaggtcggttcgtcaaacagcataatgtccggcttcagcgccagcgcccgggcgatcgccacgcgctgctgctggccgccggagagctgtccggggtacttgtgggcatgggccagcaggccgacgcggtcgagcagcgccagggcctgctcgcgggcgaccggctggtccagcagctggtgatagcgcggggccagcatcacgttgtcgagcaccgtgcggtgggggaacaggttgaagctctggaagaccatgccgatgcgccgtaccccggcgcgcatctggcgtttgtcgacgatggctccgcccttaagatagtcctcgccgtagagaatgatctccccgccatcaaggctttcgagggcgttgatggtgcggatcagggtggttttgccggagccggacgggccgatgatgctgatcacctccccgttctccacctgcagatcgatgcctttcagcacctcatgctgcccccaggatttgcgaatgccccgcagatcgagcgctggcggcgcgccgttgacggccggcgttttgatctcttccgtcagcgccggcaggctctggcgcagcgcctggcattccgcctcgctgagggtttgcggacgcttacgctgaatatcgagacgattttccagcgcccggaacagccaggtgaagacggtaaccaccatcacgtagtacaccgctaccgccagcagggtctccatcacaaggaaattctgcgcatacaagcgctggccggtgagcagcagctcgggtaaggagaccaccgacagaatcgagctcagcttaatgatggtgatgtattcattgatcagcgtcggcagcgagatgcgaaacgcctgagggatcacaatcagccgctggatgccgataaagctgaagctcagcgcatggcctgcctcgctctgccccttggccaccgacagcagcccgccgcggtggatctccgccatataggccgcctcggtgacggtcatcgacaccagcccggcgataaacggcaccccgagcagcggctgggtcaccggaaacagctgcggcaggttgtagacaaacaccagcagcaccatcagcggcacgctgcgaaaaaaccagatatagagttcgacggggatcttgacccagcgcggcgccgagagcttcgcgcaggctaacagaaaaccgactaccaggccgataccccaggacaaggtgctgattacgatgacggtcacgcacgcctgccagaatgccccaatgctaaacaatgaaaaaaagtatccccaatcgaacgccatactgactcctgttgcgcagtgcttattgtcttaatcgatgctttctaagttgtattttttgatcaacgcggcatattggccgttggccttcagcgtggccagggtggccttgatcgcctccgccagctcggtgttgcctttggcgacgtagatccccagcggcagcgggtagaccaggcgcgtagagcttatcgccaggcggccgcggctcttgtcgacaatgatctgcgccgccggggcaatctcaagctgggcgccgatgttcttcgacagcagcgcctgggaggcttccggcgccgtcgggaactcctgaatggtgatggccggtttgccgtttttcaggcaccactcatcggagtgttttttcaggctggtcacccaggtggtgcccgcctgcagaccgaccttcacgccgcacagctcatcttcggttttcggctgcaccgcgccgcccttcagggcgatgatcgacgcgccggagagggcgtaagggatggcgtcggcctgcttctggcgctccggcgtcacgtacatcccggagatcaccgcgtcatatttcttgccgatgccgaggatcaggctggtgaacttggtgtcgatcagctgcggtttggcctgcagatgttgggcgatcagcgcggcaaactccgggtcgagaccgacgatgttgttattgctgtcataggactcaaacggcgggtaggtgacctccatccccaccttaaagacgccctcggtcagcagttccgccgcctgggtgacaggggagaaacaggcgctgacggcgagggtaagcgcgacacggcgcgagatttttttcagggtgctagtcatcatggatcctcacgggtggttagggttttttttgctgagcctgttttttcaaatggccaaacgtattggtgccgcgcgcgcgctccggtagctgaagttcaccgcgattgaccttctcgcgcaggtagcgataggtttgcagggcctggctccacatatgctccccgatgctgagctcctgatattcaccggcttcgccggcggcgagaaaggtcggcagcgggcggatcagcgtgtggtaatcgcaggcgaaaaacagcgggaaggagtaccgctcctgcggcactttgcgcacccggtgggctgtagcaacaaatgtgccagcgctgagcacttccagcatgtcgccgatattgatcacgaacgcctcttctccggcggcgtttttgacgggaggtgcatcgatccacacgctttcttcattgagaacttcaaggccgggctggtcggcgagcagcagggtgaagcactcatagtcggtgtgtgcaccaattccgggaacatcttcgacgctggcgtcgaacgggtaatggatcagccgcagcttagccggcgggcaggtcaccatcggtttgaaatacccttccggcaggccgagcgcgagggcgaaagcgtcgaacagacggtggccgagggcgaaaaccgcgtcgtagtaggccagcacccgcgcgcggaaatccggcagatcgggccactcgttggcgccgatcagcggcgtaccggcgagcaccagcggatggtcatccgctgcctggaagccgatatcgaaagcctctttatggtccggcttgccggagccgtagatctcttctccttccggaacgtagcccttatggcttttggagtggccgatgtaatagttcatcttctcctccatcggcagggcgaagatctgcttcgccgcctcgcggacgccggcgatcagcgccgggtcgatgccgtggccggtgatgtagaaaaagcccacctcgcgcgccgcgcggccgatggcgtcggccaccgcctgacgcctggcgaggtcatcgccggccagatcgcggatatcgatggtcgggagttcagtaaaagcgtgcttcacggcgatcatggctgcggttcctgttcagtgagcgataaaaactgctgaaagtgggcctgctggcgcgtggccatccaggcgttgagcgaccagagatcggccaccggaacgttggtgaacggcagatggtgcagatagccgtcggcgccaaactccggggtcagcgtggtctgcgggtagccgcgctggcgctgcgaacgccagatttgctgccagaagcgctcggcaaaagccagcgccggctgatactcaggcgccgccgggtgcggcacctgcggcccctggtcgtagcccacccgagcctgcacgtgatgcacgcggtcgataaaggcgctgaagtcatcgctggggtcatccagcaggcgctcgctgaccaccacccagtggctgatgtcggcggtaaagcgcagctgggggagctgctgaatgatctccagggtgagccacgggctgtacagcgaggtggcgcgatgggtttcaaagctgcaggtcaaaccaaacccggcggccagctcgtgcgccttgccgagaaaatcgacttgctgcgccagcggccagcgatcgttgcccgcgagcagattgacaaagcgcgggttgaggccgctggcctcggcgaaacgggtctgcaggcgcgccagatgctgctcgggcgtttcatgctgggcggggagcaccccgccgccgctgaaaagaatggcgatatactccagccccgacgcctgcaggcggtcggcgagctgccgccgctcggctaccgttaacggcacgcgggcttcgataccgcagcagccgacgcgctgcagttcatccagcgtttgcggccagggggtcgtcactccccagagggtgcgaaagcatttcagctccatggcggcttcctcaggcgtacttcacgccgggcaggacgcagagcatctcgtacagcaggttggccgccagctgggaggtattaccgctcacgtcgtaggggggcgagacctcgaccagatcggcgccaatcagattcaggccgcggcagccgcggacgatctccagcgcctgaatggaggtcagaccgccaacttccggcgtcccggttcccggagcccagatgggatcgaggctgtcgatatcaaagctgagatacaccggcccgtcgcccatctgctggcggacttcggccatcagcggcgccagcgaggtatgccagcactgctccgcctgcaccaggcgaaagccctggtcaacgccccactggaagtcgccggcggcatagccctgggcgcgctggccaatctgcaccacccgtttgaggtcgagcagtccctcctcaacggcgcggcggaaggtggtgccgtgggcgattttctctccgaacatctcatcattggtgtcggtatgggcgtcgacgtggatgaggcccaccggaccatgttttttggtcagcgcccgcaggatcggcagggtaatggtgtggtccccgccgagggtcagcgggatcagcggataactattcaaaccggtgtagtaatcttcgataatttgcaccgatttgagcaggctgtaggtattgatcggcacatcgccgatatcagccaccgacagcgagtcgaacggcgcggcgccggtcgccatattgtacggacggatcatcaccgattcggcgcgaatatagcgtggtccgtagcgcgtgcccgagcgctgcgaggtgccgatatccagcggaatgccgacaaatgccgcgtcaagtccctgtaaatcttcgataaacggcaggcgcatcattgtggcgcgtccggcgaagcgtggcatctcattgccaccctgcggttggtgaaagaggttatccatgtctgctcctgaatctgacggatgaaacgtaacaggagagatagtgcgcaacccgcgctggactttacatcgtctggcgtaaatactcagttcatttattggtgaactaaatacgatgcatcacgacgccagcctcaatattcgccagctgcaggttttcgaggcggtggcccgcctggagagctacagccgggcccagcaggagctgggtatttcggtctccgccatcagcaatgccatgtcgcagctggagggacagctcggcttcaccctctgccagcgcgggcgcggcggcttttctctgaccgagaaaggtcagcagtttttacagcaggcgatccgcgtactgagcgaactcaatgagctggagcggcagtcggcgctgctcaaaggggagcacagcggcaccctgtgcatctcgacgctcgactccatcgagaccgaaacggcgctctcgctgccggtggttctgcgcagcttcagcgacaaatttccccatgtgcatatcaaactgattatccgcaccccggcggagcaactgaacggcgtgctgaacaaccatatcgacctggctatcggcagctacaactcgcaggtgcataacatcatcagcgagccgctgtaccgtgaacagcactggctctactgcagcgatctgcacccgatgttcttcagccgccagctcgataaagagcagatcagccagtgcccgctggtgacccgcagctactggaacaccagcgatctccgccgtcggggcttcagcaaagggagcgccaccgtcgagaccgtcgacgcccagctgctgctgatcctctcggggaaatatattggctatctgccggagcattacgcctggccgtggatcaaagagaaccgcctgcgggtgctgctgcccaacgagtttggctttcagtcgccgttctcggccatctgtaagcgcgggcgcagcaatgagccctacctgaaagcgttccgcgacctgctgaagaaaaacacggtggcgcggccgaagtggaattattaagcggggcgggcgcttccctgtgccggggtggtgattttcgcgcttagcgcgctgcccggcgggggagttttccctgttcaaaaaacgaacggctgccggtagcccgcccgggctgcggctgccaggcaactgcctccaggttatccacagggttaggcgccgctggtgtggacaggtcgcggggcgacagggcgcggctagcggaacaaaggatggcgtttgcgttaaataaaacggtacgaaggggaatctgtgtttgccccgcctttgcccgtgaaatcagaaaatttacttcgcaggctaaccgcagattgcttcaaaaaaattcccgtatttgttatattgttgttcattgattattcacctctgcggtgccaaaaagaacaagattcaccgcaacccaggacactgccatgttagattaccgcttcccgacagctttgcagatggttctcagcgtagcaatggcggagcagatgggtgaacgttcgacgagtgcgattctggcctacggcctggaagcgaacccgagctttatccgtaaactaatggttccgctaactcgtgacggcattatcgtctccacgcttggccgcaacggctcaattcatcttggccgtccggcggacaagatcaccctgcgtgatatctatctttcggttatcgaagataaaaaactgtgggcgtcgcgtcctgacgtcccggcccgctgcgtggtcagcgccaacgcctgctggtacttcaaatcggttgccgacgaagcagagcaggcttcgttaaacgtcctcgctcgccataccgtggccagcgcgctggaggcggtcaaaaacgccgataccagcggctgcgacccggtgccggaaatgatcgcccgctttaaaaaagcgcattaatcgttttctggtgacgaaaaaaaaccgccttcaacttgtgaaggcggtttttttgttatctgctgcaggctaggcgggcagatcctcctggaccggcttcctgcgggtcaccagttttcgcagcgtcacgtaaaacaccggcgtcaggaacagaccgaagagcgtcacgcccagcatcccggagaacaccgtgatcccggtgacgccgcggacttccgcccccgcgccgtggccgaggatcagcggaatggtcccggcgataaaggcgatggaggtcatcacgatcgggcgcagacgcaggcggcatgcctccagcgcggcttccatgatgcctttcccctggatctccagctcgcgggcaaactcgacgatcagaatggcgtttttacaggccagacccatcaggaccaccagccccacctgcacgaagacgttgttatcgcccccggtcagccagacaccaaacagcgcggagagcatcgtcatcggcacgataaggatcactgccagcggcagggtccagctttcatacagcgcggccagcacgaggaacgccagcagcaccgccaccgggaagacgatcagcgccgtgttgccctgggtggcctgctggaagctgagatccgtccactcaatattcatcccattcggcaggatctgcttcgacagctcctccagatgcgtcatcgcctgcgaagaagagaggacccgcggatcggcatcgccaatcaggtccgccgccggataaccgttgtagcggatcaccggatccggcccgtaggtggtactgatattcaccatactgccgatcggcaccatttcgccctgattattacgggtgcgcagattggcgatatcttccacgctctcgcggtatggtccgtcagcctgggccatcacgcgccaggtacgcccgaactggttaaagtcattgacataagacgagccgagataggtctgcagcgtaccgaatagctcggttagcgataccccctgcgctttcgccttatcgcgatcgacctgcacgtccagctgcggcacgttagcctggtaagtcgagatcgggaagtgcatccccggcgtctgcataatcgccccagacatcgcattcaccgcgctttgcagcgcgccatagcccagcccaccgcgatcctggatgtacagggagtagccggaaccctgacccagtcctaaaatcggcggcggcaggatggagaagccaaagccctgctggatttgcgcgattttggcgttgatctccgcgttaatttccgccgccgtgtgtttgcgctggtcgaacggtttcaggccaaaaaagaccgtcccggtattcggcgtgttggtgaactgcagcgcgttaagccccgggaaagcgaccgcatagtcgaccccttcggtattcatcccgatctcgctcattttgcggatcaccgcgtcggtgcgcgccagcgacgacccttccggcatcttcacgccgccaatgagatacagcttatcctgggtgggaataaacccgcccgggacgactttaaacatcaccccagcggcgcagagcagcagcagatacaccgcaaacaccgcgccacggcgtccgagggttttgctcaccagcccctgatagccgttcgagctgcgcaggaaaaagcggttaaacggacggaaaatccagccaaacagacgatcgatcagccgggtagggaggtctttcttcgcgccgtgcggctttaacagcagggccgccagcgccggggagagcgtcagcgagttgatggccgagatcaccgtcgagatggcgatggtcaccgcgaactgtttgtagaactggccggtgaccccggagagaaacgccatcggcacgaacaccgcacacagcaccagcgcaatggcgataatcggcccggagacctcacgcatcgcctgatgcgccgcggcaagcggcgcaagcccctcttcgatattacgctcgacgttctccaccaccacgatggcgtcgtccaccacgataccgatagccagtaccagcccgaacaggctcagggtattcagcgagaagcccagcagatagagaatgctgaaggtacccaccaccgataccggcaccgcgatcagcgggataatcgacgcgcgccaggtctgcaggaacaggatcactaccagcaccaccagcactaccgcctccagcagcgtctgcaccaccgcgcggatggagtcgcggacgaaaaccgtcgggtcgtacggcgccgcccattgcatatcttccgggaagcgggtggccagctcggccattttggcgcgtaccgcgttcgacagatcgatggcgttagcgccgggtgactggaagataccgatcccgaccgcatccttattgttgagctgggagcgcagcgcatagctaccggaacccatctcgatgcgcgccacgtcgcgcaggcggaccagcgagccatcctgcgccgttttcagaatgatattgccaaactcttcttcggtatgcagacggccctgggcgttaatggagatcaggaaatcgctctcctgcggcagcggctcggcgccaagctgtccggcagacacctggacgttttgctcctgcatcgccgtcaccacatccgaggccgtcagaccgcgggccgcgaccttattgggatccagccagacgcgcatcgcatattcaccggagccaaaaatctggatctggccgacgccgggcaggcgcgccagctcatccttcactttcagcgtggcgtagttgcgcatatacagcgagtcgtacttaccgtttggcgaaaacagatgcaccaccagggtcagcgtcggagactgcttctgggtggtgatccccagacggcgtacatcctccggcagacgcgcttccgcctgcgcgacgcggttctgcacctgaacctgcgcctgatccgggtcggtacccgggcggaaggtgacggtggtgaccagcacgccgtcggagccggcgaccgatttcatgtacatcatgttttcaacgccgttgatcgcttcctccagcggcgtcgccacggtctcggcaatcactttcgggttggcgccgggatactccgcgcgcacctggacgctcggcgggacgacatccggatattcgctcaccggcagcagcgggatagcgattaacccggtgataaaaattaaaatcgacagcaccgcggcgaaaatcggcctgtcgataaaaaagcgggaaaagtccatgtcttggattctctgattagggatcagttaagggtggcgctggaggtcatggcaacggttttggcgttaaccggcatacccggcataaacactttttgtaagccgtcgacgatgacgctatccccaggattcaaccccttctgaacgatgcgtaaaccgtctgccagccgccctggggtaatgtcgcggcgctgtgctttaccatctttatcaacgatatagacgtatttacgatcctgatcggtcagtaccgctttgtcgtcgatcagcgtggctttgaactctgcgctgcccggcagacgcacgcgggcaaacagccccggtgtgaacagacgcggcgagttatccagcagcgcacgcatgcggatggtgccggtactcggcgttaactgattatcgagaaaatccactttgccctggtgggggtaaccctcctcgccaaccaggccaatctccaccgggagcgcctgattatcgctggacgcgccttgcccgcggcgggcgaggttttgatagtggaggtaggttgactcgtcgacgtcaaagtagacgtacaccgtcttctgcgagaccagggtggtgagcacgctggcggtgtcgcccgcggtgaccaggttaccgctggtgatcagcgcccggctggcgcggccgtcaataggggcggtcactttggtgaagtcgaggttaagctgcgcggcatccaccgccgcctgcgcggcgcgaatgtcggcctgcgcctgaaccgcggctgaccggcgctgctcccactcttcacgggagacgaggttggtatggactaatttatcggtgcggttcgcctcgctttgcgccaggctggcctgcgttttggctcttgccaacgccgcctgcgcctgctccagcgcggcgcgataggttctgtcatctatcgtgaacagcacctggccctttttcacctcctggccgtcggtgtaattcactttatcaatgtatcccgagacgcgagggcgaagctgaacgctctccaccgcttcaatgcgaccgttaaaactatcccactgactgatcgacttcaccagcaccttagcggcgctgaccgtcggggcgggaggcgcagcattctgcgcgacgctgtcgtcgcagccgacgagcagaaaggagagcatcatcgcgccgagcgcggtcaggtgaatgtttccccaggttttttgcaggctcattatttttattccggtaaatgtagccgccgggcaagacgcagcgtgagaagccgcgccacttcctttgtccgggctggcttaaggccatttgtgtcgatcatcgccacaaaactgtaacaatttcgaatacactatcgcggcgattgtaggaaggcacttaactaagtgcaagaataattgttgcactttatgtgcggtccagggggagataaaaaaccgcgatcccggcgtggatttaaatgtaacaataaaacttgcattttgtgtaaaaacaggccacctttaaatgcaactgacaaagatgcttttaaccggccgcgagggggtaacatgatgaacactggcgccatcattcaggatctgatcgactggatcgacaaccatcttgatagccgtctggatattgacaccgttgcccgacgagccggctattcgaagtggcacctgcagcggatcttcaaagaacataccgggcatcccctcggagaatatattcgggcgaaaaagctgcaaaagtcgatcgaacgcttggcccacagcaacgagccgatcctgaacgtggcgattgccctcggctttgactcccagcagtccttcaaccgcagcttcaagcgccagtacggccaggcgcccggcgtctggcgccggagtatcagccgctctgttgcgcagacatctcgtcagcgatccgcatgaccggggagggtcagtcctggcccggcccatgatcgaatttgctgcctttgccgatggcatagaactgcccgcctgcgacatagtgaacggtccgtagctcgtccggcgcatcatcaaaaatccagtgtccgttgcggaatacccggtcatcgctccaggcggcgacgatatcgcccataaacagattgtgttgctgctgaatgtccgggtagggcatcactttgcacaccagccagcccgcacagcctgccacaagaggaagatcaaattccggctgataaaagaaggggatggtgtcatttttatccggcgcgtcggcatagctgcgcccgccagcgtagaggacggttgccatctggctgactacggggatctgcaccacgaaatagccgctcttttccaccagctgacgagtgaaagcctgggtgccaatataggccaccacttttcgctcgcctgccagcccaacccaggcggctgacatgacattttcgacgccatcatattttgcggaaatcatggtggtggacccgacctgcaataaacgataggccttacttatttcgacaggctgaacggacatggtttttcctttgtgcatgctatttaacgtaatgattatctggatatttattgaggccatgttcattttcgggccctctttcgtaatccaccgtgcaacgatacgccaggcgattaagcgtaaaaaggtgcgtaaattgttttcattattcataatccacgaataatcatgccgtctgtcggtaagctgctcgctacaggagagaaagaaggtggatcgtattcaggctatgcagatgtttatgcgcgtcgcggaggcaggaagcttcgtgcgtgccgcggaaaccctttccctgccggcctccactgtcaccagtaccattaaaaaccttgagaaatacctgaaggtgcggctgctgaaccggaccacaaggcgggtgagccttaccccggaagggatgcagtatctggcgcagtgccgggaaattctcgccctcatcgaacatagtgaatccaccctgagcgagtctgtcgcgcggcctcaggggcgcctgcgggttgatatgcccgcgggcatcgcgcatttcatcgtcatgccgcatctgccggacttttaccggcgctatcccgatatctacctgatgatcggcgtcagcgatcgccaggtcgatctcattcaggaaggcgtcgactgcgtgatacgaacgggagagctgaacaactccagcctggtggcccgccctctgggccgctttcgctgggtcacctgcgcgtcaccggactatcttcgggaatatggcgtgccgccgtcaccggaggcgctctctcagcaccgggctgtgcattatttctccggtcaggcgaggcgggccgatgagttccgcttcgttcgccatggcgagaccttttctgtacccgtcagcggcaacgccgcggtgaatgaaacggggctctatataaaaatgtgcctggcaggatttgggctggcgcagctggcggagaatatcgttgctgaccacctgcaggaggggagactggtggaagtgctgacggactggcagccgcccccgctacccgtcacattgctctatccgcaccagcgctttctctctcccgccgtgcgggcgtttgctgagtggatgagcgaggtggtttgaggggagtattgcttgcatttagcgcttcgcgatggagggtagggttccagcagaaatatctggtctgctgatgaatcgctcgatattctgtaatgctttgtcttttttgtgaacaggaaaaagtatgcttaatacgctacccgatttacacagaagttttgcagagcaactgaagcttaaattacagtctgattcgcggatccactcccttctcgccggcggctcgtttatccatggcgggtttgatcaatactccgatctggatttcgtggtggtgatcgaccctctccccatccatataaaccagttcttggtttatttgctcgagacgggaatagacagcaaaggtaagggcgtacataggacacaaccgttttttaatgtgcctgttgcattgctgcacaggtaatttatcgtggtgatatcttgtactgtaattgcatcttcatttataccgtaaccgatttaaaggaactgtaatgaaaaagacggtggctcaaccccagttgcccaattccgttcaacctgaaaaaaatgatgaacaaaacagtaaaaagtcagcagtcggaggaagcgcggctgaaaggggattagattaccaggctcgtgttgcagctattgctatgacgtctctccttctggaacagaaagtcagctggattgaggatgttttcaatggtgtaccggttttgattgatgctgagacgggggggcccggtgatgatatttcattaaaaacgaacacgggaaaatcggtggaggttcaggtcaagcgaggcctgaagcgtggcagtgatttatgggatgcactttgcgcgctggcaacaggcattaacgacaagagcattgcttgtggaattttggttgtttgccccaacagcagtacgaccatccgctcgaatctggctgataatattgttcgtattgggaccgggagaattgatggcctccacgaaataggtgatgatttcatcaagaacgttggccttgaattcccggagttatcccgggtgtgtcgttcccttcgaattgtcacggtagatgctgtagacggaaatgatagtgctgaggtcaatgccattagcctgctggggcgtttattcaatgaaccacgtcgagcgtggtcagttctggttgaacgcgcgcgaaaactcatcagaataagaggtcgcgcaacagtaacctcgttgcttcatgacttcagaaacgttggtatcggcatcaaaatggataccacagaaagcggtattcaactaagagcagccgtttgtgattggcttgagaaaagttattctcagtttacaatcccggggcaggcaaaaccggtttcactacagaaatgttggatcccactcaaagcctctgtcattaaagatctagagcagtttcctgatgacttatccaaagcgcttaacagctatcaccaatattcagcaaagcgcaggagtgacatcaacaagtttgatgctcatacccttggcagatatgttaccaggggcattatcattggtgggccagggattggaaaatcattactgcttcgccgcatagcattaacatatgcagctgaaggccatttggtattgctggcacgactgcgtcaggttgtctcgcttatcaatcataaaggcatccgttttgaagaggcccttatcgatgtagcgcttagcagctctggattgaaatacaaatcacctgacctgcaggatgcagtcattttatgtgatggcctcgatgaatgtggggtcagccaaaacctcgttactgatgccattcacaaatttgcagttgcccatcctgacgcgagggtattactcaccagtcggcctgtaggctaccgaccaggtcagctgggaaactggaaacattatgagcttcttcctctggaggagtctcaggctgacgacgcactaatacaagtgatggaagccttacctttcgaaagcccggaggttcgacggcacactttcgatgtcgcaaaagagcaactgaaatccttgcatctcaagggtgttgcatcgagaagtccattgattttaaccatgctcgcatccttatcttccagaggtattgagccagaaagctctcgaatttctctttatcgacagttattcagattgctggaaacggcatacccctctgtacgttctgaagtgattggaccaagtgaaccagagcgaaagtggttcatctctttgttaggctggatactgtttgagcacggtactgaaccctttgaagaaacattccgacactgtgtatctgaatggcaaaaagaaatgccaggcagctatcttgcttgcagtaataaggttaaggcatgttttgatttctgggaaagcgtaggcgtcatcgagcgcatacacacgcttaatcaagaagcagtaaccttcattcataaaacctttgcagagtatagcgccgctgtctttatcgaacagcaaccgcaaaacctaaaacgaaacttgctcattaacgtgattcaaagagatgccagtagcgaactgctctcttttgcaagccaccttgggctgatagaagacattctggatgcttggcgcgaattaatgctccagggaaaaacgacatcaacgaaagagctggtaaaggttctggacttgattattgaagcaggaaggcctgttacggatgactcattatgcatctttgccgactgctgctggaatgccttatcgtcatcctcaagcatgtattcggcaggagacgccctttgccaggtgtcaacgtatagctgggatgttgtaagggaaaaggtgagagcgaaccttcattctcatgatggctggctttggctggtttcctgggcatgtattctctctggtagcccctcagaggttagctaccaggatgcaataattgcattgaatagtattaagtcaaagtggccaaagcagctaagggaaaaacattctctgtttgatttcataggcgggaggaaagtgcaggattgtatcattcttggcgctgcaaaaattatcctccaaaaccctgaggaggtcgggcttagtacacttgacgccatcgtagataaaggacgaggggtgtccgccagctgttttgttgggttaatggaatgctatgcaaaagcaggtattgagttaccggatgaagtcactcgctatccgggaagagagaaagatttttatagcgtttacgctgaaattgatgtgaattgcatcggtctcctctctgtgctggctggaaacgataaccatcaggttttggatgagattttacctgaacacatgcttgagctcggcgcgtttttgaatataagtcgctttcatcacctcagcctggaagacctgctacatcttgaaacaacggataaagatattgatagaagcaagtttttgtaccagatagctaaagcttcaggccttgaaccagataaactcagacagcaggctgccagtttaaaaaggcagtgcgagggaaaaacgcttgtactggtttcagcctttggcaggcttcctgctgtcgatgcagacatgtctccagaaagggtcgatatcgatccagacgatttcgatgatttaatttcaacaattctgcacgccagtcagttctacagtgttttagccgccactgttctttatcagcacaaaacacatccaaaagtcatagacggaattaaacgcatccttatgcaaggagagggaacagctttgtttataggtacccggtttattacggatatgccggaccaggattggcagcaattactcctgcaacgactggaaacctctatgcctgagcagggtgcttcacacttgtttgaggcccttaccgaacctttcaattcacgacatgaaagtattgcaaaactggggttacggagtgaaatgctggatgtagcacttccggcggcctcatttgcagccaggcttccccagtctgatgaattatctcaggatattcgtctcatatatgaagactggaagctgcgggagaaaccctatccagagaatggtggtgttatcccggacagccctcgtgatgccttgtctggtattttggtcaaggataagggcgacgctaatctggcacttattcttgagatggtgcaggaaaaacgaacaaaaattcgtgggaatggtgagaaggcactcaagaatatgctcgatggatctgccgaattacagagaaacatttccaaatggatcagggatggcgtttgcaaacccacgctgttacgacagattattactgaagttaccttgcacccagaagctgttatgacgcttatacctttcctcaaagatgagtcatccggtattcgatatgctgctacagcacttcttaacacgcggttcatgacactcgagcaaatcgaattgcttgcccgcgatctttcaaatgacactgaaattgagattagagaaatcgcatctgcaacactctcttcacttatgcccggaaagggggtgatgtaagctcttccgggcaccacatcgggccccgttgtattggtgatggcatatcttgccagtccacagtatgcggggctcggaaaccggattagttcgggtcgcctgtcattctctgcacttcctctgcctcaaaggcgtcgttaagcatcttcaactgttcggattggataagaagcaaaacgtaatttggagcggcatcgtccggtttatcaagcatgacgttggttaaaacgcgagagcgatcaagcagctctcttgctgatggggattctgaagaagttaccttgacttctccaggacgtgtacggtatcaccctgacacaatggtcaattaaaacggctatatgagagcgcttcccttagtagcagaggcctcgaggcgcattttaaaagcaaggcttatcgccgcaggggaaagtactaacaggctgctttctgaatgtaagcaatgactgcttctgcaaccgtacttttgtttattgttgagtgcgggtgcagccaacctttcttttggcaatcaacggaagtaacctgtaacgcgttgtaaataattgcgaataacgcaatactgatttctctgaaaattcatgtcggacagaccgccttgttgcggaatggtctgtcaggctccatcagtaacttaatgcaaattaatgccagaaatatcactcattccccggattgctctggtgcctgaactcgatttcataacaggaaacgtaatggataatattgacgatatcataaaggacgctattcaaaaggccaccacggagcggggcaatatttcgatactgattgctggccgttctggggtagggaagagcacattaatcaacgcggtattccagcagaaaatggccgaaacgggccagggaaaaccagtgactcaaaatacgcgtgagattacgaaagagggtgtaccactcactatttttgatacccgtggtctggaaatgtctcagttcaaggagactcatgctgatcttgaaaaactgataacagaacgctcgtctgacagagattcaaatcgccatattcatgtcgcatggctttgcatacaagaagacgggcgtagggtcgagcaggcagagattgatttacacactatgctggctcgtcatatgccggtgatttgtgtggtcaccaaggcgagaagtgacaatggtttcaaaaacgaagttcagcgcttgcttcctgaatccaaaaatgtaattcgagtccgtgcgattcaggaagagatggatgatggttacgtcctaaaatcaatgggattagaaagcctgatagaactgacatcagaggttatccctgagggaaagcgtagagcgttggctgcagcgcaaagggccaatattaactataggaagacacagtcgcataaaattgtagcggcttccgcgacggccgcagccgcagcgggcgcgagtccgatccctttttctgacgctgtcatccttgcacctattcaggttggtatgattgcgggtattacatccgtatttggccttgagctatcaaagggaacccttaccacgctggtggcatcggcgatcggcgtcgggggcgcgacgtttttaggccgcaccgttgttgttaatattctgaagtttttcccgggagtcggaacggttgctggtggggcaatatcagcagccactgccagcgcaatcaccgttggtctgggggaggcttacatcaccgtgctggctgaaatttttactcaagatcctgatgcagagccaactgcaacggaaattggcgaaaagcttaaagaaaaaatgataaagatgggctcatgatcgtctaaagcgttcggtgtcaggcggcgtgctgcgctgcctgtgaacgctgagatgttttttcatcacaattttttttcgtgaaaggcacatgctgtgtcggtttatggattaaaacctagttttaagtcatgatttggaacatctttgtaagttaatctgagacacacaccatcgttgggaactctgttatggctggcgttagcaaaatacatctgacagaaacggacatcatcacaaaattcattctgcctgcaatcaaagaggcgggttgggatgtaatgacgcagatacgccaggaggtaaaactccgcgatggcaaagtggttgtacgcggcaaactggcggcacgcctgacagtgaagtcagccgatattgtgctttaccacaaaccagggttaccgcttgctgttattgaagcaaaagccaataagcatgagattggcaaagggatgcagcaagggctggattacgcgcgtttgcttgatgtgccgtttgtttttgcctccaacggtgatggctttatcttccatgataaaactaatcctgtgcagcttgaatctgagattaagctagaagatttccctggtcctgaacaactttgggataaatactgttcctggaaaggttttactaccgaacaaatgccagtcatcagccaggattactatgatgataactcaggaaagtcccctcgctactatcagttacaggcaatcaataaaacgatagaagccgtatctgccgggtaaaaacgtgtattgctggtcatggctaccggaacagggaaaacctacactgctttccagattatctggcgtttatggaaagccaaaaacaagaaacgcattctgttcctcgctgaccgcaatatcctggttgatcaaacaaaaaccaacgacttccaaccctttggcagcgcgatgacaaaaattaccgggcgcaatatcgacccggcatacgaaatccaactagcgttgtatcaggccatcaccgggccggaagaacatcagaaagcgtttaaacaagttgcgcctgatttctttgacctgattgttatcgacgaatgccaccgtggcagcgcgtcggaggatagcgcctggcgtgaaatcctcgaatacttcagcagtgccacgcagattggcctcaccgccacgccgaaagaaaccgaagaagtttccagtactgactacttcggagaaccggtctatacctattccctgaaagaaggcatcgaagatggtttcctggcaccctacaaagtggtgcgcgtggacattgacgtggatttacaaggctggcgtccgaccaaagggcaggtggataagcacggtgagctgattgaagaccgtatttataatcagaaagactttgaccgcaccatggtcattgatgagcgcaccatgctggtagcgcaaaccatcaccgactacttaaaacgcaccaacccgatggataaaactatcgttttttgtattgaagccagtgaacttctcgccatagaagaaggtattgatactgtgatgcgctggtcgctgcctgaacgtcttggctcctttgccctaactgaacaggatcacattctgctgatgggattcacgacaaggctggctttctatgatctcaacagcggattaattaccccagtggctgcttcactgggagacaccggcacccgtatgggtgatggacggtgcgaccgtgccggtaattttgtcttcgggacgatggatgacgattatcccgttaaagtcatcggtaagtttcatcgactcaatgcggcaacgctgactgctgagacgtttgcatcgcccgatgtcgctataccgaacagcatctgtttcagccccgatggtggcacgttctattactgtgactcgatgcagggtcggattatgtgctgcgattacccctcgctgcaaaaccagcgcgtgttcaccaaaatcgaagacggcggcgcgcctgatggttcctgcattgatgagcagggctatctgtggaacgcagaatggggcggcagttgggttgtccgatacagtccggtgggagaaatacacagcattctttctgctccagccctccagacaacctgcccggtgcttggtggttcgtcactccacacactttcatgtaccagtgcccgggtaggactcgcagagccaaccgcttatgacggtgcgcttttcagcattcggtcacctttttttgccggattaccagaaagccgttttgcagcgcacaaaatataacctctggcatttgatcagattcaggctgagagaaagcgtccgcttctggcactgagcggactaggtaactaagctgaaggtctgctacgagcgaaaaatagacttagggaaactggtttgtttagatcaaatcaatagagaaattttttgttctacccattgaaatgaggctgataagcacggatataaatgaaagcagctgcgctgggcatctgcctctggagaaaatagcaatggaagatttctacatttcagcaatcaaaatggacagcaacaatcagcatattgagttcgtaaaaattcatgagaacctaggtaagaagatcggacctggcactgttaattcgcgtgcattcgttggtgaactgatcagaaaagggaaagcagaattcaaaacaattacttacaacaaagaaaaaaaatcatggtctgtaggggcaaaggttgaagttatgactgatgatttcattactaccgatccaaacaagactaaacatgacaatcttggcaaccttcctacatttatctaacgtttgaagttttattaaaatcctaagccgttgcctagaacggcttttttccagattttatgccctgaatgtacgctgagtagtctcggcattttctgtgttgctatgacttctcagtatatctttactgttcgtaatatccccttgcgctgtcttgtaaagtctagttttggcacaaaccagactgtcagattcgattgcgatctatctacgattactccaggtctggtttgagccaatgcacctttgcggggaaagcaccagtccagttcaaaactcagcccacaagttttaaccccgttttcccgctttcaacaatgctcccgctatcggccttgctaacaaaatcagcccaccattgcatcattggacgtcgttgctcaagataatcgcttcgattataagctcgtcgtacctcatttttgtctatatgagccaatgctgcctcaataacatcaggcggaaacccttgctcattgagagctgtacttgcgatagaacgcaaaccatgggaaacgagaacgccccctaaaccagcacgcttgagtgctgcattcactgtttggctgttcatcggctgggttggtttgatgcgactgggaaagataaattctcggccaccactgagagacttcatcatttccagaatagcgatagctccatcaggtaatggaaccgtatggtcccgattcatcttcattcgagcagcaggaattttccattcgctagcatcaaaatcgatctcatcccatcgagcttcagcggcttcggcagggcgggtaatggtgagaagctgccacatgaacaggcatcgtgtggacaggctgatactcgccatgcgtatagtctgcattagttgtgggagttgatccgggcggatactaggcatgtttttcttctgcggtttctcgaacgctttcccgatgtttacgctgggaactgcatcaatcaagcctgtgttctgcgcataaatcatgacttcgttaatacgctgacaaaggcggcgaacagtctctaatgcacctctggcctgaaccggctgaactgctttaaccagagtatgagccttaatctcagtgacactgatatcaccgattgccgggaaaacatctctctcaagagagcgccagatatcgtcggcatagtcctctgttacgctggttttcttcacattccaccaacgctcggcaactaataagaaggtgttggttttagcttcttgagaattcctcacctgttctttctgatgctcctgaggatcaatgtcttttgctaataaaactcgagattcagctcttagtttacgcgcatcagaaagtgagacggcagggtaggctccaaagctctgcttagttcgctgctttgtcagaggtcgatagtaacggaactgccagagcttactaccgctggacttgattagcagagtaagcccatcaccatcatacagctggtaatcggcatctttaggtttggcggctttgatttccgtatcggttaaaggcttggtttttcttgccatggggagtctccatgcgtttaggcccaacgaaaacaatagagcttttcgttgggcccatcaatgggcctaaaaggtgcggatttaatgagttctcttcggacgtcgtggggcaaattgagggcacaaaaaagcccgcagggcttgcgccgtgcgggctttcaggacttcatcggatgactctggtaatcaccgatggagaattttggtggagctggcgggagttgaactcgcgtccgaaaacgatataacttgctgaaaaatattgttatgtgtattttttttcccagcgcgtgcattttaagtgcattttgttgtccgctccaagtccatgcatcaatgttaagtggccacttgaagctctggacccgtgtcgctatcaattaacggctgaccttgaaccattttttcgacagtttcgtttgaaggatatggaaccccgagttctactgtgtttgggtttgaacgatgggtttcaacaaacgaggttccgttccatttttttgaaagataaataattccttcaaaggccgctggatcctgtttctgagattctaaaatcatgtggaatccacggcgttctattccgcgtaagaagctggaaaaacactccttcagcaactcgtcatccaaatccttgaacttgattccctgcgcaagaaactcgaaataattaagaatgtacagaaggccgttaatggcatctctatactcgtcgggtaccttcatgttcttgtattcttctttatccgggttgcagcgccactcagagagttcttgtggcacataacgcataccccggtaaaattttgtgctgttccgtaactgtttttggtattcgggactggtgcgtgtgttaatgatcatgttaagggtatgtgacctgcgcgtattcgctgctgacgttatacactggatccaccaccccatcccaacgagcatacctgtaaccataatcgaaagagatgtttgataagccggagtgtatctcaggattgcatacccgatcaggactatcacataacaaacagtactgaacattggaagaaattctgcagtgtctgggtagcgctttttgataaagcagaagatagaagaaatggcagcgccagatccagcaatgacgaccagccaatcaatgattgccaggttaaaggggagttttccagggtagatataagtaaatagtgctctgacaatcaacatgagagcaaaaattgtagcgctgacgtttacaagtgttctcgccatcttattgattcctataacaaaagacctccgcaagggaggccttattgtgctaatggaggtttgtgttacaaatttaggtcgtagttaaccttcaccaaaacctacagttagtgtgtttttcatagtggtcactccagttgtaatactgcgccagtacctacgttaagctattgaaaattaaaaaaacataaaatttcttgtattagtggagcacaggataacagtttgtaccgtaactcttcaagtactatcagtatccctgtgctgtcctaatgagattttaatatcataaaaatcaatgtgttatatattgtcaagaaatatatttacattgcgtttattgctatagtctaacttgttgtttttaaatgaatttacgtttatgtaaacgcaatagtgcaactatcaattacatagatgatagctcatttcacaaaaagcaatggtagcgtcattcttaattttcttcagacgtaggcagttttactcaggttgacactacctttatagacgtctttccatcatatactgcaaggtatttaccataattgcggaacaacatttccggccctttgtggcccatctgtccggcaagccagaagaggttaacaccctggctgatatgcttggtggcgaatgtgtgccgcgtctggtaagggttacggtagcgcacgccagcttttgtcagggtcggcacccatgcctttttacggatcgcgtcggcgtttgcccagggttctcccgttttcggatcgctgaatatgaactcacttttcagaaaggtgtattgcttctgcgcctgcagggctgccagcgcctcactgttcagctcaaccttacgggtaccggcttttgtcttggtgcctttgagtacccctacgacactggccgcttgaacgtgagctgtgttccctatggtgtcgagatcaggccagcgcagcgcgcatagttcggagctccgcagaccggtattgaaggcaaagcggaacaggttttcccattccgggtacctgcagctctgataaatagcgagggtttccgctggcgtgaacgggtcaacctcgtaatcgtcggcgctcgggctgctgtcgatcacgtggtaccggctggcgctgacgaggcttaccgggttaatggtcagcaggccgtctgtcaccgcttcatctatggcgctgcgcagaaacgaaaggttattccgggtcgttttcagctttgttttcctgctggctatccagtttttaaggaccgctggcgtcaattctgacacgtgaagtttatgcagagctgacagcgccgacagacatttttcataaccgttgatagtcgacggggacaggttgcggttctggcagattttcaggtactcgtccaggtaagactttatgtttttggttttcttcactaccccgaacagctccagctttttggagttggggaaatatttcgcatattcaaaggtgccattgacgatctggttttgtatctctccgcgtaggcgctcggcgtatttcacaccgcgtgcgtttgcttccagtttggagaggggctcccggcacagaacccctttatatgtgaaagtgataaccagagtgtcaccagttttatgctggcggatggttacacctcttgggagagatagagatccttgttttgtcttgcccaatttgcaatctcctttaagtcgatccaacgttcttttgacccatcgacttttaaaacatgaaccccttcctgccacactccacgttgtaaccgtttgttaacggcatccagcgtctcgcccatctcttcgcagtactttgtaatcggcacaacatccagataaatcatcttcacctcacaccacaatcaggccacgacagtggcgccacgtctcatacatccgcttaaccacttcccggcagtagtagccgtgcccgtctcgcgtcaggtcataccggccgccgtagcgcagccggacccacatttcgaacgatttgtgcattgttatttacgcccattttttttgtcgcccagggatcgtccgtccacccttactacattggcgttaccccagacgttcggggtcctcactcttgacggtgttcgggaatagttttcctggagaagggcggttatcgtccatccgatagcatctttgcttcgggatttacgggcctgaatgcctcgcttttcataatttttcattaaaaaatcagcctcatcggaagtgagattttcatgtctaaattcactgtaaatctcttgcattacttcacctccttgcgatacccgacatcgaaaatgctcgtggccataacgatggctctttcagcggtcagcgtttcttccttcacgcaaagcaccgttgcgatctcttcgatggccttcttgcggtactcagcctgccgatcggtaatgatttcgttgcacaggtcgacgcattccgagcagatgtttacgctgggcccggcgatcagtttgtccgcggcagtaatctgtttgcagaagttgcaaaccgttttcgggtctggctcgcgctgcggcatatggcgccatttatccaggttgttatagatagccatcactttccctcctcaataatttcaacgcccgcagaaatcagcgtggccgcacatgcctcgcgcatacttccggcgccggcggcaaacccctgataccattcggcgtcagaaccgagttttggcagccccggcagcttaatctgcacggctgttttcgccggagcaccaaagcccagcttctgcctgagttcagcgatagcggcatcatgctctgcgcgggcctctggacccatagcatccaactctgcgtaacgttcagcgcggttcttaagtgctcgcagaaccaggtgagtgctaacgccttttccgaaccggaagccgggctcgagaatgaccgggcagggcagagtttcgggataatctatcggctccgcatgctcataaagcggagttacatcacgcaaaggatctgcgtgggcgacgcgctcatcgagcgttacatggcccggggctccgccgccttccagtttccatgcggtcggtttgccgtccattgcggccagcgccagcttgaacgcggccagcgtattactgtcgctaataccggcaacctcaatttcggaaatttgatgttgcagccattctctggttagtttactgctcatcgtgttgcctcccactgaagcgatttatacgcacggagcacgtgcgacgttttgccggaaatcaccgttttcagaatgaagaaaccactgttgtgcgacagaacgcccggagacataaacaaggcggcatcgacagcgcgattgtgccggcggaactcgaataccgaactggtgacggtggcggtcgcaatggcgccctgatcgttaaattcgactttcatcggatctgacctccttaactgctgcaatgtagccatcccacccgccatagctgttaaccatttcgcccaggcgtgaaaggcacgcattcatccagcggatcccacgaggagtcagcgctggcactgttccccagtcgataaattccgaattgctgcgatgcatatatttaatgaggtccagaatgttgatgtaatgcgcccagcgccgttcggtatcccatcccttatctttcaggtaggagtcaataaacccttgtagtgctggctggttaagcgagatatcgccatactggtgacggtataccgggcggcgatgcaggctgaccagatagaacaggtaggcatcgcaaacccacgttaaggcccgctggtgggcctcctcgacagaaccggctggcatccagatgtcgctattgctcacagttaacctccggctcctcgcgttggttccagttccagatcgcgccctctttactgtctggctgttgcgaagcgttacagcaaccacagttcacgaaccaggtactttcaccatcaaattcccgcaaggtttcaacgaggcttacgtgcgggtttccgcagaacgggcacggtttaagcaggccgtcacggtttattgtttcaatggccagcgggcacaggtaaggaacaactgacgcgatggtcagattttctttgccgatgtggagatctgcggctttagccgtggccagctcaatcgcttgctcaactccagaggcgtcgacctcgtatttaagcgggtaacggtcgccgtctggatagttggcaataaaagtgacttcataggttgatcccggcattatttttcctccggtgtataaatggctttgtcgtggatgaattcgccgttccaggtctttttcatcggcagctcacccttcatgtacaactggtacagacgatggcaacccttctccagcagcgtcggggtaaacttcgtgaaagcgtccttgccgtgtggggtgatctgcgtctggtcttctgtcaggtacttatcacgggcataagaggcgacacgccagcgcgggtctttctccggatcgcgttgttcgttaaacacccagtcacgctcgaaggcccaccacatcattttgttgatgttgacgccgttcagggctttgcagaatgctggaatggtcacgcctttggtgaagtgcttctcaagactttcaacggtagcgctgagtgttttgttttccagtgcggcagcttccgctcgttcctctgcctcaatcaccatcaaagccagttctttacggctgatagcgacctgggttgacggagcggggatagcgttacgctgggtaaagtaaaactccacgaggtcttcgtgatatccccacgcctgatcggtatcgacgacttttgacatgcgagccgcgccgcgttcggtccagagaatcagttggcttgtgtgtttattaaccaagtaactcatggttactaggttcttaaattcctttaattctgaaccagttaagaggaagtagtgtttaccatcctcaaaacgttccaggtttcgcgacaggttattacggatgtttacctcatccgtgccatatcccgccgccaattgttcagtggtcacgacgcgctggccgcgatactcgataatctgcagatcgcgagctgccacagttgccagttcagttttcattgccattttcgctacctctcaatgcactatcggttttactggcaatgcctcaccagcgttaagtcgcatggacaggccgacaaaaatgtcgtccagaaagtcgtcaaaccatgaatgcccatcctcctttaatatctgatcgttggcgtaatagaactggaacaccgcgagatagcgctcttcagggttgaactcaataagcgctgcttcaacgtgctcgataagtaaattttcaataaggtcccgcgttaagccgaagacattctttccggccttaaactggtattctccgttccgcagcccccaacgcttttcgcatccgatgaggtagagcagggctactgtgctgcgcatggaatggacgattgattcagcccactcatgctgttcggctaaactcagggagcctttgccgtagcggttttcatcaagcatccaggcagggatcgtgacgtcggattgctcctgtattaccttcaggcgagcaacgagctgtttcacattttctttttctttgtcgatcatttgctttctatctcccggttgtacgtggaatggctcatcactacccagttacggccgtcgtcttttgataacagccgccagcgcgggttaacctttaggctgaggtatccggtgcggcgcatgcgccgtgcataaatacgtttccggcggtaccgcagcaggacctgcaacgcctgcaggtgtactcgctcaggaatgcgtattgctgttagtgccactggctccctcctgattaggggcgatcacctgatacccagctttctttgccatccagaaaaaagtgtccatcgtcgcgataagctcgttatcgcgaactttgcgggtatcaattacctggccgttttcaatcgtcataacgacctgcactttttcgtgtgtaatggggggggtaaattagccattagttaatttctccgcttttagtgactgttcggccagcgtggcaatgagcgcattcatgaaatccacaccatcaggtgttaacttattaatgcccatgcaattcgaataatgctcagcaatcaaatgctccgcctgctcgcgtttatggttgtcataaatcatcgattcgaaaaatttgattaatgattttgttaaaatatcttcatcaagttcaacaggtaacgttgttccatcgtccatttttacgagatgaaaataactcccagtccttcgcatcattgaatcaagcttggcgcgaacgaggtgacggcgacgcgtttcaatcagatttgttttcacggcgccttgcctcttcgctaatccatgtaaagatgtcacacgatatattcattgcaaggccgattaatgcttcggtttggcatgaattcattttgctaaagcaaagatgcattaaatccagcagctcgttcaggttattggcttgagttaatacctcttcaatgcaggtatctttttccgggtcccacataattacctcccgtacgctttacgaagataaaggcccgcaatcacttcctgtccgcatgatgcataaagcagggcggttttatatgcattgtggtcgatgatgaatgtcatatttagcgaccttttctaatgttattcactgtggagtcagtcataacgcaaagttcattgagcagactggtaaagcgaccagcgacatgcttatctgttctggctatcgcagcaaagagcaatgcattgaactcatccctgagttgattggcgtacgcatctgcgtgctgtgctgtccggagtgctccacttgcttcaatgagtacagggaaatcagtactcattgttatttcaagattatcttttttacgggatgcaacattcattacgctttcctcaaaatgagtgaggcctaagcaattaagccgttttatcctttcgggtttttaagttaatttcggacggttattttttattgtttggtcataaaatagatgtggcttgtaatatcaaatctctgacatctggataaatatcgagaatattcttcgcctcatcacatgcttcttcatatgacttgaagaaatcaaccagaacaaaatgattatctacacgttcgtaaactgcgaactccatcccaccaacaaatgtcgtattgaattggtaatcaaaacctttatcgtgaggctgcacagcatggcaataagaccagtgcgaatttgctgctctgagcttggcgtggatatcaaatgcctggctagctgggtttggttgggaggttgtattcatctcattggctccgttgtttgccgatgagttaatagtaccttaagtactagtattatcaatactaatactcactaattctataaccataggtattagttcatgaaatataatggaatttagttgtaaaaaaaaccggctttcgccggcataggttgggggagggggggggaggggatctttcaaacgaagcggtattttgcctcaactacaacccctacaatcctacagttaccatttacttgcattagggggtactgtggattcaatggttttagatacttctgtccgccatcaataactagttttttgaacgtagcttcatttgcatcatctaacttagctataaccaaactgccgttcttgggctctcttcctgtatcgaccaaaatgtccattccttctgggatgcttaaccctgttggcgatgtcattgaatcaccttgaacacggagccaaaaaccgtctccttcaacattgatatccgactcaagccactcatcaatatccttaatattataaggctcacaggcttcagcccaggcaccagcacttacccagctgatcagagggtaagaaggccttttttcgtaagtgcccacaaatttgatgttctgcgccgcagcatgcataagctccagctctttagctaagtgcgggctaaactcctcgatttggacctctaaaatttttgcaaacatcaaagcggaacttacatttagcgcgtttcgcccgttcagatagtgacccactgcgctttgcgtgatgtttagctcatctgctatgtcctgctgagtgatccccagagtttttttctttgagtcatatatagccttcaggcgctctgcgtctttctgctgttcttcggtaaggcgatttttatttttcatgactgtattttattacctttagtttgaaaatgtctcctactgatagtactatagattttagtacccatgatactattaattaggctatcaatatgatgacttttaccttgaaagattatgcatcccaagttggccaggtgcgagctggcgagcgtctgggtgtgactcaaattgctataagcaaagccgtgcgctcaggtcgaaatattgtcgtgcacgtgacggatgatggaaaggttagcgcatatgagagcaaaccatttccagcgaaggccaaaaaaaacaagtctgttaagtccattcattcaaacagcggatcaggagtgtgatatgtcgcactcgatcactaccgaaaaccaagttaagccattggatatcgattatagcgatccgcgcggtgtgattgtgcatgtcaccggctggaatcgggataagcagcaggtttatttcaccagaccgggttatccgcatgaatgcatgcagccagtctggaagtttcaacagtacttcacgaggctaacatcatgagcagcaaaattcagggatatgtatgggatgcctgtgctgtctctggcatcaaaggaacacgccttatggtcatggtgcgtttggcagattattccagcgatgaaggtacgtgctatcccggcgtcaaaacaatatcacgtcagataggcgccggtgaaagcacaatccgaacggcattgtctgagcttgaagcggaggggtggctgcgacgagagaatcgccgaaacggtaaccgtaacacttcaaacatgtatcacctcaatgttgagaagttggaagaaatcgcactccagcaaagaacgctaattcgactggagcgtatcaaaaacaaccgttttgaccctccagaatctgacgcttcggattttgaacagtcagaacctgacgcgtcagaaatgagaggctcaagtgcgcttgacccgtcagaatctggcaaaagcaaccgttttgaccctccagaatctggaggacatgatccacaaggtttaaaacctgatccacaagtaaaagatcatgaaccacaagaagcggtcgcaaagcgccagaaaaaaacatcattcgaccctgcaaggctaaaacctgaaaacgtcagtgacgaagtctggcaggactgggctaagttccgacgggaaacccggaaacctctaaccgaaacaacctgcacgtaccaggctaagcaactcgctggccaccagaacgccgatgaggtgatccgtcgctctattgctggtggatggcagggtctctttcctgaacgcgtgcccaatcaaccgccagcgccagaggtcattacgaccagcgctggcaatggcgcagggaatacctggtacacacaatccaacgacggctccgcagaggtgtttatcaatcaggccgctattgaccgcctcaagcgtggagccaaccgcccatgaaaatcatcctgaaacgcatgctggttgccggttttaaccgcggctttctgcgcgaaggattcgtgacgtggtgttttataaaattcgatttacggagtatctaatgggcccggctgaactatccgaaaaactgtgggacaacgccgaaagggttgctaaatacctcctgcctcgcgggcatctggagggcaaagagtggtgcgcgggtaataccaacggagatacggggaaaagcctaaaaatcaatctgagtgggaaaaaggcctggtcagattttgccagcggtgacagcggcgatctgctcgatttatgggtgctggtgcgcaactgccagttgcatgacgccatgcgggaggctaaagaattcctgggcctgaaagatgacgatcatcacttcgaggccaagaaaaaaacattctcccggccaacgaaaaagggcgtgaaaaaagcgaaccattgctacgactatctggcctcgcgcggaattactcgcgagactgctgaccagttccgcgtttctgatgcggtggtctggtaccacgatgaaaaccgcgaagtaccggcggtggcgttcccgtacatccgcaatggcgagctgctgcaggtgaagcggatcggcatcgaacgtcctggcgggaaaaagctcattatggctgaggctgactgtgagccgagtctgtttggctggcaggctatggacgccaaagcccgcgcagttgtgctgtgcgagggtgaaatcgactgcatgacttactcgcaactgggtatctgtgcgctgtcggtgccgttcggtggcgggaagggagccaaacagcagtggatcgagtacgagtatcacaacctggaccggttcgacgaaatctggcttagcctggataacgacgatgtggggcgcgaagccgcgaaagaaatcgcgcgccgcctgggagagcatcgttgccgcatggttgagctaccgcacaaagatatcaacgaatgcctgatggccgggatgagcgaggatgatatctggaactgtctgggtacggcgaaattctttgatcctgacgaactgtgctccgccggcgatctgcttcaggaaaccattgatgcgttcgagcatcgggacgccggtctgttcaccagcccctgggcatcattgaacagcaatttcaagttccgcgccggtgagctgacgctggttaacggggtgaacggccacggtaaaacggaactggttggacatatcgccgtagaagcgatgagtcaggatgtccggacgtgcgtcgcctctctggaactgaagcctgggaaaatgctggcccgcctgacccgccagaccatctgcaccgcttcgccgaaacgcgaagaaatcgtcacgacgaatgagtggttctccgatcgcctgtgggtgttcaagcttaccggcaccgcgaaggccgaacgcctgctggaaatcttcgcctacgcccgccgccggtatgggattgacctgtttgtgatcgacaacctggcgaaatgcggactcgacgaggaagactacggcggccagaaagaatttatcgacacgctgtgcgacttcaaaaacgagcataactgccatgtccttctggtcacacacgcccgcaaaaccaacgaagcggcacctacggggaaaatggacgttaaaggcaccggcgcattaaccgacatgcccgacaacgttatggccgtatggcggaatatcccgcgtgagctggcgcagcgcaaggctgatcgcatggggtatgagagcctggacaaggacgaacaaaccgctattcagatgccagcctcaatgatacgcctgttgaaacagcgagagggcgaagggtggattggtgacattggcgccacctttgacgcccggtcacaccagtttcttgaaggcgacaaggggccgtttaactacctggtcggtaaacaacaaagtgaactcgatattgagtgggacgctgataacgttacgaggtactgagtatgaaaaacgaagttttaaaagaagcaatcgagaactatcagtgcctgaaagcacaggtcagccagcaggagtctgatgatcccttatcgttcggcggtgttgatgtggacttgttcgaagcgtttatgtttgcaaaaagccagcttcaggaattgattagccccgatgaatatctggagttaaagcggaaagtctctcatctcaacaatgaggttggtgcgttgatacttgaaaatatcattcttaaaaatgaggtagccaagttaggcggcgatcctgattttttgggtaacgtggccgctgaggggaaagcatgaaactggaagcttccctcaaacactttagccctcaaagcaagcacatcagtggcggtacgggagataacaacaatgcgtgatattcaactggttcttgaacgttggggggcatgggcctctaacgaaggttctcgggttgactggtctccggttggcgctggattcaaaggactcattcctcaggcgggaaaatcccgcccgtcctgctgtgataacgacggcatcattgttgataccgcagtgggtatgttgggtaagaccgggcgccatgatgagcttaagcttattatgctccactacatgtatgacgtttcgaaatccacaatttcccgctgggagaaatgctctgagggtaaaatcaggcagaaactgatgattgcagaaacatttattgacgcctgcatcatcatgtcaggagcgacactagaaatggacgactggacgcagcgaaatagagttgtaaaagttgcataaaaagcttttcgttacgaattttacctattattgtgttaagagtggtcacttcgacacacagcttaatcatcgaaaccctgccaactggcggggtttttgcttttctggggggagctatgcagcagccatatttttttaacccgggcatgaccactcaacagcttgaagactggcttgggcagcagaaaacacatcttgcccactttaaccgtctggtggcagaaaaagccgctcttgaagaacggctaaaagagatcgacatgtctattgagttgctttcatcatcaggtttcgtaggaacgttgagttttccctatagttccagtcctcttctggaaagtcctcaaacagaaaagcagctaaaggcagattgaaggagcttaaggcctcctgagcatcttcgcttatgttctcaatccttagctcatcctggataacaaaaagagcatcttccagcttcagttccctgatttctgacggctgccattttgttttcataaagatgaggtgatgcaacgcagcttttccctcaagcggattgaaaatggtggcatatttttgtctgtgttgatggagaatcatttcgaggacataaatcagcgctgctctgtttctgatctgattgtcctgcatgctgcccggataatacgcggagtgagacatgctcctgttttcacacacgcgcgatttgatcacatgcaataggttgtggtagtcagacacgttaatctccttgtttgtatggttattggcaaattaacaatatcaaacagggaaataagccgccactcagcggcaactattcacaggctgcgcactcgcgtggccttttttcatttcaggctcacgggaaccatcttcgatacggctcgttgttaaatcagcccgatgggcctgacccttttcaaacacacagcaccccgttaacccggaggtgaacctatggcaaagcatatgcaagacaaagaaagcatggccggaattacctggctggctctgctgatcattgcttgctggggtggacttgttcgctacctgatagatgtgaagcagagcaaggcaacatggagcttgatcaatgctcttgcccaaatggtggtttcagggtttaccggcgttattgctggcctggtgagcattgaaagcggactgagcatttacatgatactggccacttccggaattagcggggcaatgggttctgttgctttgacctatttctgggagcgcattaccggagtcaaggcgccatgacagcagaccagattatcgaggggatcctcggcaaagagggtggttatgtcgatcacccctctgataaaggcgggccaacccgctggggcatcacgcaaaccaccgcccgtgcacatggctacaccggtgatatgcgaaacctgccaagggaaacagcaaagcaaatcctgctgagcgattactggaccggcccccggttcgaccaggtagcgagtttgtctacgttactggcggatgagctttgcgacactggcgtgaacatggggcccagcgtcgccagtaagtttttccagcgctggctcactgctctgaacatgcgcgggaagctataccccgatctgatcccggatggcgccattggcccccgaaccatcaccgcgcttaagggatacctttcagcccgcgggaaagagggtgaacaggttctgttgcgtgcgctgaactgcagccagggtgccagatacctcgaactggcggagggccgcgaagccaacgaggattttctctacggctgggttaaggagcgtgtcatgtgaagatgattattttcgctttgcttgtgctggtggctgtgctcgttctgttacttcttcgcaaatatacccggctggagttcgtagggcatgccagcttgctgctgaaaacgtggtctgtaaagctgggagctatcggcgcgctggttggtgtatgggcgcagtcgttcccggatgctgcgctgcacgcctgggcgatgctgccgccggatatcaaaaatatcctgccgccaaacatcgttgcactgattagcccggcgctggtggtgctggccgtgctatcgcaatacgtgcgccagccagcattgaaagagaaggccgacgaactgaaggatccgcagcaatgagctttgaaattattgctgggctggtggttgtcatcctgggtgctatcgctggtgcgttcggcattggtcattcacgcgggaccagtaaggcagaagccaaagccgatcagcagcgtaccgaagagaacgccgccgccaccgtcgccgcggcagaacgtaaggcggaagttgtgaaagaggcaagcgatgtacaggaagacgttaagcgtatgggcgatgacgatgttgatcgcgagctgcgcgaaagatttacccgccccggtagtcgttgatacggcctgcagctgggtgagggtcatctacctgaccgaccacgatatcgacgtgctggataagcagaccaagcgtgacatcctggcgcaaaacaaatcagtgcaggctaactgcccgcaactaaccggcagggttacgcgatgaccaaggcaaagaatattgaatttcgactgagcaaacttgagaaagggccagacgagaacgttctggccatcatggagataaggtcgagagctattgcaggtagcttgctgaagcagatttcctgccaggcgttgaaagatcgataatgtcagtgaagattgccttgtaggctttatttaacttctcaactgttttcggggtgatatcactcgtaggcggcgcgtcgataccatccattaattctatttcagcaaattttttcaaaacctgaaggacactctctttttgttcttcaggcatcgtttgcacaataaaagcaacaacgtttctcagcgccaggagttgagcatgagttacatagtaatgatcgatcatattttcattcctgttctgttgagctcggcgatttaacagtatagcggagaaatattgcccgctactctgtggcaactttcaatcgtgatgactggcaatagcgggactttttatgcccggaacggagtatctatgaaagaacgaaaactcgtaattgaaattgatgacaacgccattgattcagtcatcgaaaaggtgcgcctgctcaaggatgaactgagaagccttaacctgccgatcaacatctctgttgcagtgccggcagcattaaagccggaagaggaaaggaacacgcaggatgccagaagcgtattccttagcaaccttgatgccgaaattactcaggcttggtcatcattgacagagcttttgaatatacgtcgcgacgcgacctcctccgactagctgctgccgctgtttttagttcattcacggattttgtgaatttagccctcacgttactggcgctatctgttggcaactcgctgaagaggcaggatacagcgatagataagatctcggtctcacctttgagtgactccagctcctcgacgattttctgtaaaagtttctgattatcaacggacattaaaacgctccttactttttgtgtgaaaactcaaagataagcgagcgttactttttgcaacatcctgatattcgatcagtgccgccaccgtgcggcatttttattaccagaagtaggagaagaagcatgttgacagtaaaagtgatgtcgcctggcggcggcgaagaaatccatagcggcctgagcgttggtttcaaccccaatcagcagagtatctcagtgtctggaatggaccagaacgtgttcctgaagcagggggaggtggcctatgtgatgaacgcaaacggcaagaccatttcccgttacgaacacagggcccagcagtaggcattacagaagctcctgagctaaggggcttcgataatgctaaaccgaagcatctgccttaagtgttataaaaaaccccgtggaggaaatcccaaagctacggggtgctgtacagccagccaatgactgattgtagccacgaagttggtttattttctactggttgagaataaaactgagagccaggaaggcttgagagtggctcatccataagctcacgggtagaacggcagactttgtcatggcagagcaaagtcataagttagtttaggtaacatttcggatataacaagcgtagcggggcattcctaataatggagcaccgcagctaaagcattacaggagccattcgccgagtggcttcgataatgctccccacatcgcacagaggtaagacatgtcagagatcaccgcatccgagcaaatccgcctggatatcatcaagaaagttaactacgacaccgcagcggccaagctggccattgactgggttggtgatagcaatctgaaagctgagctattcgctgactcttttgatcgtgtcttcactgaaagtgagattgtctcgaagacccgcaaggccatccaggaagcgactgaggcgctggcgctgtttgataccatcgcagaacaggcgagctaaggcattacagcaggcattcactgagtgcctgtgataatgcagggctcaattgcggtgttgttgtttcccctgttaatctgtcccaaataaaccgatggggaatagggacgtgaaaaagttactttttgcagcattaattggtgtttcagctttaacaattaccgcatgtgcgccaacagtccagaaagtagattacaaccagagatcaatgcttttatctcttggaatgaacaaaaacgacgtcatgcagatcatggggtcaccacgcaggacggatgtgaaccaggaacgtgagcgctggatatactggaataaggctctctatggctacacaatcattgataacgaacaattggctaacgatcgactggttataactttcgttaatggtaaggtcaccaaatggggccagcaaacgctgactgatgacataatggagtcatcacaaaagagcgctcaggcttatgctgaggcactcaagaaatagccatttcagtcaaacgagaacctcgcttcggcggggtttttttatatgcaaaaagaggtaataaccgatgagctttaaacatgaacttggtcaggtggtaaccgtcagtatcagtgaagaagaagggcatatcaaagctcgtgatgaatatacgcatggccccaatcagtaccttattcattatcgtgcagcagacgggcgagctgtagacgcatggtttgaagaaggggagctgtctccatctgcacagtagacgtacgcattacagaagcccctcacattgcgagggtcttgataatgcgaatgagtatcacttttgatttcaaatggtgaaattggatgtttggacgtctaaatggccatgagtggtggatatgaattattaaagtgcaaatggtaatcattatcatttaatgggtcctcccggaggggtggactaccacggggcggcggactcgcggaaaacggctagttttcatttttcatagtcatcatcatcatgtgcacaggttattgattttccagatgtcggattttcaatgatgtcgaatcgtataaaaagtgttcaccatcatggaccaggaaatcgctactttaaaactcaatatcaaccagcttgccgggattactggcgtacaccgccagaccgtcgctaccaggctaaaaaatgtcagtcccgcccagggaagcaacagcaaacttaagttgtatcttgtcaccgatattctgacagaattaatgatcccgacggtttcctcatcgaatcttgaagagatgacaccccctgatcgcctcgctcactggaaagcagaaaatgagcggttgaaatttgaagtagataccaagcaacttatccccgccgaagacgtcgcacgtgaattttcaatgatggcgaaagccgtcgtcatggtacttgaaacacttccggacattcttgagcgcgactgtgcacttacgccggttgcggtatcacgcgtgcaaagcgtgattgatgacctgcgcgatcaggttgcccaaaaagtaatggacgctgaaccagaggaggatgagccagaggaggactgatgacaaaacgggcatctgccaaggggatacgccgcgatgtctccggtattcttcgtgccccacgtcgtatgcaggtggccgatgcggtcagctcatatatgcgtgtgccgatgggggcgggtaactccgtaccatgggaccccaatctggccccttatattattgagccgatgaattgtctggcatcccgtgaatatgatgcggtggtgtttgtcggaccggcccgaaccgggaaaacgattggcctgattgatggctggattgtctacaacatcgtttgtgatcccgctgacatgctggttattcaggtctccgaagagaaagcgcgtgaacattccaagaaacgcctcgatcgcacattccggtgtagtccggaagtaaaatcgcgactcagtccgcgtcgtaacgacaataacgttcacgaccgcaccttccgggccggtaactatctcaaactgggctggccgtcagtcaacattatgtcgtcgtcagactataaaagcgtggcgttgactgactatgaccgctttcctgaagatatcgacggagaaggtgatgcattttccctgggttcgaaacgtaccactacgtttatgtccagcggcatgactctggttgagagttcacctggccgagatattcgtgacacgaaatggcgaccaaacaccgcacatgaggcaccgccgactaccggcatattatcgttgtttaatcgtggtgaccgccgccgcctttactggccgtgtccgcattgcggagaatattttcagccggaggtagccaatatgacgggctaccgggattcccttgatcccgttgtggcaagtgagtctgcatatctccagtgcccggcttgcaaaggcaggatcaccgcagatatgaaacgtgaactgaatatccgccatgtctggttacgcgatggagaaaaaatagaccgtgatggcaacagatttggggagccgcggcgatcacgcatcgcttcattctggatggaggggcctgcggctgcatatcagacatggtcgcagatgatatacaaattcctgactgctgagcaggaatatgagtccacccagagtgaagagacgctgaaaacggtagttaataccgactttggtcggccttatctaccccgagccagtctcgaacaacgtaagagtgagctgctcgaacgacgcgctgaagacgtgccgaagcgatctgtaccagatggtgtgctctttatgactgcaaccgttgatgtgcagggcggtaaatcccgtcgtttcgtggttcaggtgactggctacggtgagcagggtgagagatggctggtcgatcgctacaacatacgccagtctcttcgggcaaatgagcacggtgaatgttactccatcgatccggcaagttacccggaagactgggatttacttttgtctgacgtgttcgaaaagtcatggcccttagcgagcaacccttcaaaacgcatgcggctcatggcgatggctgtcgattccggcggtgaggatggtgtcaccgataacgcctataagttctggcgtaagtgccgccgggatgggcttggtaaaaagattttcctcttcaagggcgacagtgtccgacgctcaaaactaattacccgaacatttcctgataacactgacagatcaactcgccgggcaaaagccgctggcgatgtgccgctttaccttcttcagactgatgcgctgaaagatcaggtgaataacgccctgtggcgagaatcacccggcccgaactatgtgcatttccctaaatggctcggcagctggttttacgatgagctgacctatgaggaacgttcacccgatggaaaatggagaaaaccgggccgaggtccgaatgaagctttcgatctactcgtttatgccgatgcgctggccatattgcacggatacgaaaagatcaaatggccggatgcgcctgaatgggcgaggcgggcaacgtggattgaagaaagcacgccggaaactggcgaagcgtcacccacgttatcagcaaaaacgacccatagcagaaaaaaacggaaggcaaataagacggatgtcgaaaacaacccgtggactacatcatcaggaggctgggtgtgaaacaaaccgatattgaatccattatccagcgttataccgatgcggaaatagctgtgctggatggaaagtctataacattcaacgggcagcagatgacgctggagaacctgtctgaaatccgcaaggggcgtcaggaatgggagcgtcgtcttgcttccctgctggctcagcgtaacgggcgacccggttataagctcgcgaggtttccatgagcctgttagatgatgcgattggtgtcttttcccctggttggaaagctgcgaggttacgttcgagagcaatgatacaggcatatgaagctgttaagcctactcgtacgcataaggcccgcagggaaaatcgttccgctaaccagcttagtcagatgggagctgtttcacttcgagaacaggctcgctggttggacaataaccacgatctggttattggtgtattcgataagctcgaggaaagggtagttggagctaaaggaattattgttgagccacacccggtactaaaaaacggaaatatcgcaaaaaaactggcagaacaaatcagaacgaagtgggccgaatggtcagtcagccctgaggttacgggacagtttacccgcccgatgcttgagcggttgatgctcaggagttggctcagggacggggaaattttcgctcagatggtgagtggctcagcgcagggacttgatccagtggctggtgtacctttctggcttgaagcgctagaggctgattttgtgccgatgaccaacaatgagtcacagcaactttgtcagggggtttatgtcgataattggggacgcccgaaaaagtacctggtttataaaagtctgcctgttaccggccgtcaattggatacgaaagatattgatgccgggaatatgcttcatctcaaatttacccgtcgccttcatcaaaccagagggacgtctctcctttctggtgttctcatgcgcctcagtgcgctgaaagaatacgaggatgcggagttaacggccgcacgcatagccgccgccctggggatgtacataaaaaaaggggacgggcaaagttttacggatgagaacagcaaagataatcgtgatgtaatgattgagccaggcattatctatgatgatctccttcccggtgaagacatcgggatgatcaaatctgacagaccaaaccctaaccttgaaacattcagaaatgggcaattgcgcgccgttgctgctggtgctcgtctcagcttctccagtacagccagaaactacgatggaacgtacagcgctcagcgccaggaattggttgaatcaacagacggttatctgatcctccaggactggttcatcggagcaattacccggccaatgtaccgaaactggttaaaaatggcggtggcttctggcgaaattcagctaccacgtgggctggatatggcgtcgctttacaccgcagtttattccggtccggtcatgccgtggatcgacccagttaaagaggctaatgcatggaaagcgcaaatccgaggaggtgctgcgacagaatctgactgggtgcgagctagcggacgcaatccggatgatgtgaaacgtcgtcgcaaggctgaagttgatgataaccgcgaactgggactggtgtatgacaccgatcctgcaaatgataaaggaggcaccagtgccgaagtcaaagaaccggacgccccggcgtccgaaagccagcgcaagaagtaattcgtggtttcgtatgcaggccagcgccgacaatcaggtagaaatttatatctacgacgagatcggctactggggcgtgaccgcccggcagtttgttaacgaccttaaagcgcttggtgatgtgacccatattaatcttcatatcaattcgcctggtggcgatgtctttgacggcatcgccatttttaatgctcttaaacatcatggtgcgtcaattaccgttcatatcgacggtctggccgcgtctatggcctcggtcattgctatggtaggtaatccggtcatcatgcctgaaaacaccatgatgatgatccataagccctggggctttgctggtggtgatgccaacgatatgcgtgactacgcagagcttctggacaaggttgagtctgttctgatccctgcttatgcagagaaaacgggtaagagcgccgatgaaatagcggcgatgctggaagatgaaacatggatggacggcaaagaatgcgtcgctatgggttttgccgaccaggtcaccccctctcttcaggctatggcctgtatccagtctaaacgtattgaggacttcgaaaagatgccaaaaaatattcgcaacatgttaacgccgccgcgagctaccacgcaacgcgatccccagcaaccacaaatgcagcagccggtggtgagccaacctcccgtaattgacgaaaacaccattcgtgctcaggtaatcgctgagcaaaaggatcgcgttaatggtattaacaacctctttgcgatgtttggtggtaaacacgccgaactgcaggcgcagtgtgtagcagatatggattgctctgtcgatcaggctaaagacaaactgctggcgctgctgggtaaagatgcttcaccatcggcgaaaaccacgccagcgcatattcatgcaggtaacggtaattttgtcgccgatggtattcgccaggcattgatggcgcgtgccggatttgaagatcaggaacgtgacaatgtctacaacggcatgaccctgcgtgaatatgcccgcatggccctgactgagcggggaattggcgtatccagctataacccgatgcagatggtagggctggcgctgacgcacagcacctctgattttggcaacatccttcttgatgtcgccaacaaatcgattttgcagggctgggacgaagctgcagaaacctttgaactgtggacaaagaaaggccagttgtcggactttaagacagcgcatcgtgtggggatgggcggattcccgtctctgcggcaggttcgcgaaggcgctgaatataagtatgtgactaccggcgataaaggtgaaaccatcgcgctagccacctacggagaaattttttccatcactcgccaggcaatcatcaacgatgatctgaaccagctcacagatgtaccgatgaaaatgggccgtgccgctaaggcgactatcggtgaccttgtttacgccattctgaccaaaaacccaaaactctcagatggtaaggcgttattccacgcagaccacaagaacctgtccaccggtgctatttccgtcagcagcctggacgatgcacgtaaactgatgcgcctgcagaaagagggagaacgatctctgaacatccgcccggcatttatgctggtgccggtcgcgctggagacactggctaaccagacgattaaatcagcgagcgtaaaaggggcggatattaacgccgggattattaacccgatccagaattttgcagatgtgattgcagaggcccgccttgacgaagctgacgcaaaagcctggtatctgatggcggcaaaagggacggacaccatcgaagttgcgtatctgaatggtgttgatactccttacattgatcaacaggaagggtttaccactgacggtatcgctacaaaagttcgtatcgatgctggtgtggcgccgcttgattaccgcggcctggtgaaatccagcggccagtaatcattacagttctgaaaacgacgcccggaagggctttttttatacctgaaatcagccctgcggggctgacaggagacgttatggctaaaaattatgtgcaagacggcaaaaccatccccgtgaaaaattctggtaccgaggaaattctcagtggtacacccgtttctttaggcggaatgattgcggttgcaattaccgatattcaggcaggtgatgtaggcgacggattcgctgaaggtgtctttcttttacctaagctgccagctgatgccgtgaccgccggggaaaaggtatatctcaaagctggaaatgttcaactggatgacaccgatgcggtgttagccgggactgcctgggaggatgctgcggcaggcgttaccgtcctggaagtcaaaatcaatggctaatgcctttgacaatatggctgacagaatggatgaactgacggcgaaaaggctgggcagaacggtgactattaatggcgatgagcatattgctgttgaaagtcacctgctgcctgagctggggccggtcgctggggatgggattaacctggttatcttcagcgcaggctatcagtcggcgcggggagatgaggttatttataaaagtcaggtttacaccgttacccgatggctcctctttaatggtaagccgcaaatctggattgaggaggtcacaggtgacgattaaagggctggaagagctcaggcagaacctgagcaatatcagtaaaaatgccattcctcgggcgacatcccagtccattaaccgggtggctggaagggcaatcagccgcagctctacgcgcgtggcgaaagagactaaggttaagcgaaaactggtcatgcagcgcgccaaacttaaacgggcaagccctaaaaaaccaatggctaccatccgggtaaatcgcggcaacctcccggcgataaagctggggccagtacgagttcaactttcacggcgaaagcgcgacaacggtagttctggaagcgttctgaagattgggaatttcagcttccctggtgcttttgtgcaacagcttaataatggtcgctggcatgttcttcgacgaaccagtaaatctcgttacccggtagaagtggtgaaagtacctctggccacccccctgactgctgcattcaaagaagaacttcccaaactgatggcatctgatatgccaaaagaaatgatggctgcgatcaaaaatcagataaggctggtaacaaaatgattcacccgcaagtacgaaaagctgttctggataaactgaagtcaatcaaccccggaaaaatattctggtatgacggtcggccagctttcctggctccagaagagttacctgcggtcgctgtatatcttactgatgcaaaggcgacgggcggcagtattgatgaggaagagtgggaggctgtccttcacattgaagtattccttaaagcaactgctaccgatagcgagctggataaatggatggaaacccgcatctatccggccatggctgacgttcctgagcttgccagtatcgttgaaaccatcagcgttgccgggtacgactaccaacgtgacgatgaagccactacatggggctccgccgatctccaatattccctgacttatattatgtgaggactatatgccaactccaacacctaccacgccgacgaaaggtgccgggacaactttttggatttataccggaactggtgatccctacgatgatccgttaagtgatgtcggctggacacgaacggcaaaggttaaggaattaacaccaggggaactgaccgcagagtcctatgatgattcctatattgatgatgatgcgcctgactgggatgcaacagctcagggtgttaagtcagccggtcaaaccagcgtaacacttgcctggaaacctggtgaatctggccagaaggatctggttgactggtttatgagtggtgatgaaaaatcttacaaaattaaatatccaaatggggcagttgatgttttcaccggctgggtaaatagtttgggtaagactatttcacgaaacgaagttattacccgtagtgcacaaatcaccaataaaggtaaaccttctctggctgaagataacgcatcgactaacccttaatatattcatcagcggtgctaaggcaccgcgaaaggtaatgaaatgacttatcttaaaaaagacacattaaatcccgatggtgagaatattttactgtttgagttatcggcttacagtagaatgcaatatattgaatttatggttgaagagaggaagtcattaccgtcagaggaaagcacacctgaagaaaactttaaattggccaccttgttgactatgcgtgatcaggccatgctcgttgcattgtccttgagcgaggctgatgaagagcaacgtgaagggaaagatattttccctgaaattatacgaaaatatccaccagggttattgggcagcgctgcattacttgtgcgtatgctttcagggatgatcccaccagttaataatgacactgagaaaactgaagaagaggaagagccagatttggaaaagtcctgacccgctcacgtcgctttgctatgcgattagccagggagtttggacggccagactggcgcgcaatgctttcggaaatgtcttcctctgaatggttcgaatggattgagtattaccaggataattgttttagcgacgacctcctggactctcattttgccaatcttagttatcttgctgtcagtctctttaccgatccggataaacacggaattacctcccttgattttagtttgttatcaaaacgtgagggagaaagtgagttggattcagacgagcaacttatgtcgatagccgaaagcattcctggaggagttcgctatgtcccagccagtgggtgatctggtcgttaaaattgacggcgatagcgcaaaatttgatgaggaagttgctcatctgaataagcagctgagcgggttaggtagagccgcgaacgacagtacagcgcaggtcaccgcagctttcacgcggcaggagcgtgctgcaaaacgtgctggtatttcaatcggccaatacaataatgcaatgcgtatgttgcctgcgcaacttactgatgtcgcaactcagttagctggtgggcagagcccatggctaattttgctccagcaaggcggtcaggttaaagactcatttggtggcctgatcccaacatttcgaggattacttggagctgtaagcccgttggccgttggggttgcagctttgaccgccgcaggtgccggaattggatatatcttctatcagggaacgtcaaccctttccgattttaataagacgttgacgctatcaggcaacacggctggtctgactaccgacagaatgctggcactggcaaaatcgggacagcaagcaggactcacctttgatcaaaccactgattctctgactgcattaattaatgctggcgtgggggcgggtgcgcgttttgatgaactaagccagtcagttgcaaaattttctacggcatctggtatccccattgaaaaggttgcggaagcgttcgggaaactgaccaatgacccgacatccggcctgattgcgatggcgcaacaatttcataatgtgacagccgagcagattgattacgttgctcagttacaacgttcaggagatgaagccgctgcacttcaggcggctaatgatgcggcgacgaagggatttaacacccagactcagagcctgatcgataacatgggaacgattgagcgctctgctgattcgttgaaacgcgcgtttaaatccatgtgggatgctgctctggatttggggcggcctgacaccgcaggggagatggtaagcaaggcgcaatcagcttttaagcaggctgatgacatctggaatctcaggaaaaatgatcgctatgtaaacgatgaagccagagcccgtttctggaatgacagggagtcggcccgactggctcttgatatggcgcagcagcaagcaggtattgccaaagccagcgcagcagcggccgaaaaggaagcggaggcagaatctgaaaaacagaaatatgccgctcaagcacaagccaattatgctaaatcgcagactgcgcttgaaaagtatactgccaggcagaatgaattaaataaagctctgaaagaaggacatatcctacaggctgattacgccatcaatatggccgcagccaagaaagaatatgaggccaccttaaaaaaaacgccgaaaccaaaaggcgttaaagtttctgctggtgatcgttcttctgatcagactgatgccgaaaccctgcagttgatgacgcagttaaagttgctgcaacagcatacggggcttaacgataccatcagtcagcaacgcaaaaatttgtggtctttacagtcaaaattcgcggttatagaagaggcgtcgaaaacacgcgcgctgagtaaagaggaacaatctttactcgccagcaaggataaggttctggcgcaggctgaggttaatgcgaaacttggcgatcagatcgttgctcaggaacgtcttaataagcttcaggataactcgttaaaatatgttactcagatgcaggaaaagactgctgcactgacagatagtgctgggttaagtgacaaggacgcacaacgtaatagagagagggcgcaattaaggcagggatggaaaaatcaggggggaagcctggaagatgaagggtatcagaaagagctttccgcacttgagggttattacgctgcacaggatgaaatgcgtaataactggttggccggcgttcagtcgtcatgggaaaactatgctgacatggccaccaattacaatcagatcgctgcggatacaaccaatactgcgctcggaggagtaacaagcaatctccagcaggggttatatgatcttgcaactcagtctgaagatgctggcgatgccctgagtaacatggttgaaggttttggtaaaacagtcatccagaccctggcccagcttgctgcacaatggctggtatatcagggggtgcagctgcttgtcgggaaaacaacacaagctgcagctgcagcccctatgatcactaatgcacaggctacagcattacaggctcaactggctgcatatgcttccactgcagctattccaatcgtgggcccggctatggctcccgcagctttgactgccgctattggtgtcacagagcctctagttgctgccatctcaggattagcccttgctggcatggcgcacgacggcattgataaaattccggaaacgggcacctggctgctgaaaaaaggggagcgggttacgacggcaggcacatcagcaaaactggatgccactctggaacaggtgcggaaacagcgttcccttgccggaaacccgctgcatgttgagttcaataacacctacaccgggaaaccggacgatgcaatggtccaaatgttggatcagcggcagcgtgcatctgaaaaaaggcttaagcaatattttacttcccaggttattaatccaactgagaattatggtcgatcacttaaatcagtttatccggggaggcgtaagaaataatgaccgatatttattatcctcatgattgtatccccggccccacgtacgataattatggatttgaaccgactgatcctatgattcgaaccgatagggtgggggggcttgccaggcagcgtagaaaatatacatcagtgccgactgataatacggttgtctggcagtttaaaactgacgcgcaagcacaggcatttgaagcatggtacagggatgtattaactgatggtgttgcatggttttacatgaaatgcaaaacacctgtcggccttaaattttttaaatgccgatttgtaggtatttataaggggcctacctttattaaacccggtctttggcgttattctgcaactgttgagttaagagagcgtccacttgctccagttggctgggggaaatatcctgagtggattgtcgggagttctttactcgatatagctctgaacagggagtggcctaaacatgacagcgattaaccgcctttatgcgtcctccgggtctgaggtcatcattggtacattgcagatcgatattggcggccagacgcattatttgtgtgagggttatgaggacattacggcggttaccgaggggggcgaaaccgtaacgtttattgcctgtgccattgtcctttcccttccagccagaaacgaagatgggacgcaggacctgaagtttatgctgtgcaacatcgacggcgttgtatccacggctattcgcaaggtcattgatgccatttccactgccagcatcacattcaggaaatatatttccactgaccttaccgcgccagcggagccgccttacgtcatgccggttaaaggaggctcctggactccgcttactgtaaacgtcaccgccggatttaaaaatatgctcgattatgcctggccacgtgacagatacacgttgacgtacttccaggggctccgttactcccgataggttccttatgctcaacattgacaaatacctggctgtccgctggcagatgggcggccgcacttttcctgttctcgactgctacggcattgtacatgaggtccgccgggacctggggctgcctgaatggcccgcgtttgaggcggtgattaaagagcgtggaagctccgaaatgggggaagtctgcgagagtttttcgcgtgacctgactccctgcaagccgtgcaacggtgcggttgccgcctgctatatgggaaatatgatcggccaccttggtgttgtcgtcgaaatggagggagcgctttacgttattgaatgcaatccccggcgcaacgtaaccattcttcccctggcgcgttttgagcgtcagtttctgaaagtggagtattaccagtgacaatccgcctttacccgtcgcgtttgcctggcgaaccgctggagacgcatgaacacagggatacgaccatacatgactggatgctccagcatgtcgataactaccgtaacgatatggtgcagcgtgttgccttcgaagttaacggtaaaccggtcccaccggcagaatggccgttatgttttatcagcgctgagagcgatgtaaaagtttatccgatcccgggtgagggggtttctgcggcgactattgcggcatgggcggcagcggctattgctgcagcatcggctgtttatgtgctgatcaccatgtctaacatggataaaggcggctactcatcatcaaatgggctggggctggatttaaacccggctaaagcgaaccaggcgaagcttggcgaccccatacgtgaggtgtttggccgctgccgtatttatcccgattatgttgtgcaacccgtgacccggtttaaccctgatgatccgacgcgaatgactgtcgaaatgatggtttgccttggaaaggggaatttcgcgtttacgaatggtgatatccgtgtaggttcaacacctatttcagcattaggggactcgttcagttacaacgtttattcacctggagcagatgtttcaggagatcggcgaagtgaaaactggttcaactcgacagaggtaggtggtacttccagcgggagtgggcttgatatggcgcagacctcgccagattcgacagatatcaacgctgatagtatgaccgtttctggcgcatccgtgacgtttaacgggctggatgatggcaacgatgatgacgatgaaggcaatgcgttgcctgagtcgtgggttgagggggccattgttacgatcgtcgcaccgatgaattttctggtttcaacctcgtcgggatatagcgttctcgccagtaactctctgggtgaaattaatccctatccggggatgccggttaccctggaaatcaacggcactgaatatgaactggttattgcaacttatacggcaaaacaggacgcgataccgggagcgggtggaaacgcggccagcctgaaagcaaatgcctccccatcaacatatgattactccggtactggccagacttttacgatcacctggcagggacatgaatacaccatttccctcattgcggactatgtgaatatgtccggcctgctgatggcgataaacgagggcctgaccggatcaggattactggcgcaggatagtggcggtgttgtgctgattgctgaggcatcaagcccctggctcggcggaaacattacctcatcatcgctcccggtagccgtttttggcgacagtcctgtatttacctccggcaccgcgtccagcggaggcagtccggcaataactgctaacgttacgctggcgtatgggagtgcaaccggagtggcattttccgggataccggagggaacacaacgcctggcgctggctcaccgtggcaacgagtaccgcattgcggatgcggacggtacgaccgcaacggttcagcggctgattgagggagtggttgatccttcctggtctggcttctcaccccgcacgatgattgactatcaggctacagggatcagcgacaacaatacctggatggggccgttccttgcctgcccggaatctgaagtggtggacgctttcgaggtgaatttctcctttccgtctggcatttgcggattcgacagcaaaggcaaaaaacgcatcaggcattgtgagtgggaaatacagtaccgtgtttatggatctggctctggctggacgagcaggcagggggtttacgcgcttaaaaatatcaacgggttgggttttacagagcgttttgatctctcttctcctgggctggttgaggtgcgctgtcgccgccgcaatgagcagggtagcaataacgcgcgtgactcgatgtactggcaagcgttgcgtggtcgcttgttggctcggcctacatcctatgctggcgtcaccctgatgggggttacggttgagacggggggcaaattggcggctcagtctgaccggcgcgtaaacgttgtggccacgcgcatttatgactctggcgtagcccgtagtatctctggtgcgctttatcacgtcggccgttctcttggtatggaaatggatactgaggcaatagatgccctggagcagacttactggaccccgaacggcgagtatttcgattttgccacgggtgacagtatttctgcgctggaaatgcttcagaaaatcgctgcagccggaaagagttattttctgctaaatacccagtctgttgcatcagtgggtcgtgaaggtgttaaaccctggaccggggctatcacccctcacgagatggtatccgagatgcagaccgatttcgttacggtgactgacgatgattacgatggtgttgacgtaacctatatcaacggatcgacctgggcagaagagacggtgcaatgccgtctgcctggcaacccaacgccgctgaaaatagaggcataccgggctgatggggtaggcaatcctgatcacgcataccagattggtatgcgccgactgagaaaataccagctgcagcgtatgacgcataaaacgacgacggaactggacgcgctctgttacaacgtcggggatcgtattgtgctgaccgatgatatccctggcagcaacaccatttcgtgtttgattgagtcgatgactactgctggtggggtgaccacattcgatgtgtcggagccgctggactggacttttacaaatccacgcgtctatctgcgttatcaggatggaaaagcatcacggctgtttgaagcatcacccacaggcgacaactatcaggtatccgtcccgtatcaatctgaattcgcagatatcctgctggatgatccgataattgagcctccccggttaattttctgtagttctgagagcgacctgtatcacgccattgtgtccgagatagtgccgcaggacgatggaacctgcgagataacggcccggcaataccgtgctgaattttatgactacgacgacgccacataccccggcgacgctgcttaataccaaaaaaaccctttcaactttatctttcgctcaaaccctcgtttgcgcgaagcctctttttggagcaaaaaacatggccgaacttaacccgcctttgggaacgacgacgcctgaaatattcctggataacgtcaagcgcgctgacgagctggttaacggtccggccggaacggttaacgaccgcgcaggcgaaccgctcgatacctggcgccagatgatggctaagaatgacgaagttcgg

SEQ ID NO: 55 - DNA, 384542 bp, Unknown
  source: /note="Description of Unknown: MKP2_coc_1 Mutant Bacteria sequence"
tgtgctcacgagtctgcggcatcgggccgtcagtcgcagcaacaaccaggatcgcgccgtccatctgcgcagcaccggtgatcatgtttttaacatagtcggcgtggcccgggcagtctacgtgcgcgtagtggcgagtcggggtgtcatattcaacgtgagaggtgttgatggtgataccacgagctttttcttccggcgcgttatcgatctggtcgaatgcgcgagcggaaccaccgtaggttttagccagaacggtagtgatggcagcagtcagggtagttttaccatggtcaacgtggccgatagtaccaacgttgacgtgcggttttgtacgttcaaatttttctttagacacggctatattccttactatagtgctctccccttcggagagagcacgggacttaggttttaatcctgtggattatttaccacgggcttcaataacggcctgagcaacgttgttcggcgcatcatcatacttcaggaattccatagtgtatgatgcacgacctttggtcagagaacgcagctgagttgcataaccgaacatttcggacagcggtacttcagcgtggatcttaacgccggttacttcggattcctgaccgcgcagcataccgcgacgacggctcaagtcaccgataacgtcaccagtgttctcttccggagtttctacttcaaccttcatgatcggctcaagcagaactggttttgctttcttaaagccttctttaaaggcaatagacgcagccagtttaaacgccagctcagaggagtcaacgtcgtggtaagaaccgaagtgcagacggatacccatatcaactaccgggtaacctgccagcggaccagctttcagctgttcctggatgcctttatcaacggccgggatgtattcgccaggaattacaccacctttgatgtcgttgatgaactcgtaacctttcgggttagagcccggctccagcgggtacatgtcgatcacaacgtgaccgtactgaccacgaccaccagactgcttggcgtgtttaccttcgatatcggtaactttcgcgcgaatcgcttcacggtaagcaacctgaggtttaccgacgttcgcttcaacgttgaattcacgcttcatacggtcaacgatgatgtcgaggtgcagctcacccataccggcgataatggtctggttagactcttcgtcagtccatacgcggaaagacgggtcttctttagccagacgacccagagccagacccattttttcctggtcagctttggttttcggctcaacggcgatggagattaccggctcagggaattccatacgctccagaatgatcggcgcatccgggtcacacagggtgtcaccagtagttacgtctttcagaccgatagcagcagcgatgtcgcccgcgcgaacttctttgatctcttcacgtttgttagcgtgcatctgaacgatacgaccgaaacgctcacgtgcagctttcacggagttcagtacggtatcaccagagttaaccacaccggagtacacgcggaagaaggtcaggttacccacgaacgggtcggtagcgattttgaacgccagtgcagagaacggctcgtcgtcgcttgcgtgacgctcagccggggtatctttaccgtcgtccaggataccgttgatcgcaggtacgtcaaccggggatggcaggtaatcaattaccgcatccagcatcgcctgaacgcctttgttcttgaacgcagaaccacaggttaccaggatgatttcgttgttcagaacgcgctgacgcagagcttttttgatctcttcttcagtcagttcttcaccacccaggtatttttccatcagctcttcagaagcttcagctgcggattcgatcaggttctggtgccattcatcagccaggtcctgcatgtcagccgggatatcttcgtattcgaaggttacgccctggtctgcatcgttccagttgatggctttcattttcaccaggtcaacaacgccggtgaaaccttcttcagcaccaattgccagctgcagcggaaccgggttcgcgcccagacgggttttgatctgaccaacaactttcaggaagttagcgcccatgcggtccattttgttaacgaacgcgatgcgcggaactttatatttgtttgcctgacgccatacggtttcagactgcggctgaacaccaccaactgcgcagtaaaccattaccgcaccatcaagaacacgcatggaacgttctacttcgatagtgaagtcaacgtgccccggggtgtcgatgatgtttacgcggtgcggttcatactgtttggccataccagaccagaatgcagtagtcgcagcggaagtgatggtgataccacgttcctgctcctgctccatccagtccatggtagcggcgccgtcatgaacttcaccgattttgtggtttacaccggtgtagaacagaatacgttcggtagtagtggttttaccggcgtcgatgtgcgcactgataccgatgttacggtagcgtgcgatgggtgttgtacgagccatttgattcctcgtttatttctttaggcgttcagttaagttatccagagcgggcgactcatctgaagcgcccgcctggtgactatgactccgaagggattaccaacggtagtgagcgaacgccttgttggcttcggccatacggtgaacgtcttcacgtttcttaactgcagtacctttgttgtctgcagcatcagtgagttcgttcgccaggcgcagagccatggatttatcaccgcgtttacgagcagcttcaacgatccaacgcattgccagggcattacgacggaccggacgaacttcaactggaacctgataagtagaaccacctacgcggcgggacttaacttcgacagtcgggcgcacgttttcgagcgcaacttcgaaggcttccagttcagatttaccagaacgctgagccagggtctccagcgcgctgtatacgatagtttctgcagtagattttttaccatctaccatcaggatattgacaaatttagccagcagttctgatccgaacttcggatccggcagaattttacgctgaccaatgacgcgacgacgtggcatggaaatactccgttgttaattcaggattgtccaaaactctaagagtttagtatgacattaagataaatcagtttggccttacttaacggagaaccattaagccttaggacgcttcacgccgtacttggagcgagcctgcttacggtctttaacgccggagcagtcaagcgcaccacgaacggtgtggtaacgaacacccggaaggtctttaacacgaccgccacggatcaggatcacggagtgctcctgcaggttgtgaccttcaccaccgatgtaggaggtgacttcgaaaccgttagtcagacgcacacggcaaactttacgcagtgcggagttcggtttcttaggagtggtggtatatacgcgagtacatacgccacgtttctgcgggcaggcttccagcgctggcacgttgctctttgcaactttgcgcgcgcgtggtttgcgtaccagctggttaattgttgccattaaatagctcctggttttagcttttgcttcgtaaacacgtaataaatcgcctcatatattatgaggacgcagaattttagggcggtgccgaaaaggtgtcaagaaatatacaacgatcccgccatcaccaggccaactgaccggcatgtttgactgtgagtctgacgaaatcagtatagctaaccctgccgacactgtccgcaatttgaccagccagcccgcgggcgtcaacgtcgtcttgcagcacgtatagggttatgggggcggattgcaggatctcaaggaagcgaccatcggcgatggccgcggtgacgccgtcagacagtagtaccagatcgtcgccgtgctccatcaaacgaagcatcgctgcgatgtcggcatgccagggggaaacactgagcgtatggagcatgggggcctcagaaacgcaaaatcacatcatattcatgcagacgggcgcgcagggcatccggcgccaggcattcgacatccaccacccacggggtcgcgggatccaggccgcgctctcgcgctgagtcggcgcacagccagcactggtcgatatcatatagcgacagcaatttaaaggtagcgatgtagtcgcgggccagcacagcgccaggccgctgttcgggtaacagctgaaacacgccgtcgcccacaaaaaacacgccaatatcgtcggtgagcgcggaggttgctaataaggcatcgaggccttccctgccggcggcgctgccgtgcggcgcagaggaaaatacaaaagccacacgtttcatcagaactgcaccatccgatcgcaagtaagcgccgcttccgctagcgcgccgagcccgctcaaggtaaaacccggctgcaaattgtggccaggcagagcgagctgttgcgcttcgcgttcgtccgttacgccacgacgcagggcggccgccacgcagatatgcagcgcgacgccgtgctcatcgtggagggattgccacccgcgcaccagatcgaactcatcgctggcgggcgccgtcaactggttagcgttaagcacgccttcgcgatagaaaaaaacgcacgccagctcatggccttcctgcagcacggcctgggcaaattgccaggcgctgctcgcctgctgcgtgccataggctgggccggtcaccgtgagggcaaaacgcattacttatccagcccctggaaatcgccgcttttgaactggcgaatatagaggtagacggtgtgcttggagatgttcagacgatcggctacctggttaatagcgtctttaatatcgaagatccctttctcgtagagattcagcacgatttgacggtttttcgcattgttagacacgctgcgatcggcattcacctcttcaatggtgaactccagcgtctgggcgaccagatcgtctaccgaagaagcaaagttcaccggcgagttcacttcaggcgtttctggcggaataaaggtgctcatgatctgggaaaacggcacatccagattcatgttgatacacagcagaccaatcacccggtgatcgcggttgcgaatggcaatcgtcaccgacttcatcagtacgccgcttttagcacgggtaaagtagcatttggaaacgctgctatcggcgcccgtcatatcgtgcagcatgcgcagcgcaagatcggtaatcggtgaaccgatttggcggccggtatgttcaccattggcgatacggatggcagagcatttcagatcctgcaaagaatgcagcacgatttcacagtgcgaaccgatgagcatcgccaacccgtccactaccgcttcataagatttgagaatatcgaaatcggtctggtcaaagggacgttgatccagcaggtcaagctcgctggtttcattggttaaaagcgacctggacatgaaaaaaagcactccttttcaggagcctgtcgttattgtcagggcaggctcatcatcattattaagctatctaaagtaatacagcgcctgaggatctttccagttttaattatatctgcgctcaataaaaaagccgccgcctctgacgagacggcggcctgaacctgattacttcttagcgtcagctttcgcgtccgcggctttcgcatcgcctgcggcttccggctgtgcatctgccttcggcgccggtttgatatccagcagttctacatcaaagaccagcgtagagttggccgggatgcccgggacgccagttttaccgtaggccaggtccggcggaataaccagcttgattttgccgcctttcttgatgttcttcaggccttcagtccagcccgggatcacgccgtcgagacggaaagagagcggctcgccgcgagtataagagttatcaaactctttaccgtcgatcagggtacctttgtagtttaccaccacggtatcgctgtctttcggcgcatcgccagcgccttctttctcgactttatacagcaggccagtttttgaggttttcacgcccttctctttggcaaagttgtcacggaaagctttgcctttagcttcgttctcagtggcgtctttttccattttctgctgagccgcggtcttcacgcgcgtttcaaaggcctgcagagtctgttcgatctcctggtcggacagtttgctcttatcggcaaacgcgtcctgtacgccggcgatcagctgggctttatccagcttaatgcccagcttctcttgttctttcagggagttttccatgtaacgccccagggacgcgcccagcgcataggccgatttctgatcgtcatttttaaatgccgatttactctcagccgccggggctgccttcgttgccgtatctgcagcgaaggtcagcggtgcattcagggcgacggccattgtggccgccagcagcgttactttaaacagtgatttcatccatttctccagggccggggcctctcgccccagggttatcgtaaaaagcaaaaaacgtactatagaacgttgccgttaaaatctacatacggacgttcctgaatatcgcctcttttaggactatttttgtatgaataagtttcctgtacggcgcagcgatgctgcgcgccaggggaaacttaagtagaatccgcccgcaggatcagactaaagaggttacccatgcacgatagcacattagaaacgcgccttgcggagctggaaagccggctggcgtttcaggaaatcaccatcgaagacctcaacaaaaccgtgaccgcccacgagatcgagatggcgaagatgcgggagcatatgcgtctgatgatcgagaagctgaaggcgacccaaccctcccatatcgcctcccaggcggaagaaacgccaccgccgcactattgaggcgtaaaaaaagcgggtttccccgcttttttgtcgtcttcgtgccgaagcgcaaagattagtggcagccgcagccaccgtggccgccgcagccgcctttaccatggtcgtgaccatgatcgtggccgtggccgccgcagcaaccgtcatgaccatggtcatgatcgtgatcgtggccatgcgcgccgtgcacgtgaccgtgctccagctcttccgcagtcgcttcgcggatggcgacgacttccacattaaacttcaggttctggccagccagcatgtggttgccatcaaccacaacgtggtcgtcttcaacttcagtgatttctactggtaccggaccctgatcggtttccgccaggaagcgcatgccaacctgcagttcatcaacgcccatgaagacgtctttcggtacacgctgcaccaggttttcgtcatactgaccgtaagcgtcgttagcgccgacggcaacgtcaaatttgtcgcccacttcgtggccatccagcgcgttttccaggccggaaatcagggagccgtgaccgtgcaggtaatccagcggcgcgcttaccggagactcatcaaccaacacaccgtcttctgtacgtacctgataggccaggctgaccaccaggtcttttgctactttcatgatatctcctgagatgggaagaatagtggcgcagattgtagcggaattctgctgccgtgtaccctttagcttaaaaaaagccgacggataacgctagtcgggatgaaaaatgccaatcacctgctcctctttgcgtacatgctcacgggcctctttatctgcctcacgcatctgatgaccgcacttaacgcactcaacaacatcgacattattctcacgccacattgccagcgaatcctgcgcctggcacgccggacatttcgccccggcaataaaacgtttacgcactgccataagatttacctttattcaaactcgtcccagccgtccagctgccggctctctttctgcatttcgcgctggaaaatctcttccagttcgcgccgggcctcccgcacgcgtgatatctgtaccgtatcagtatgcactggcattagctcgcgcagcattcgcatatcgaggcgtcggaagtgcagctgcgcgcgctgggcctggtgaggatgcatcccgagggtgatgagcgctttgcgccccagctccaacgcactggagaaagtttcacgagaaaactgcgtcacgccggcctgcagcagctcatgcgcctcaacgcgtccgcgagcgcgggccagaatatgcagatgtggaaagtgttgttgacacatttccaccagccgcatggtatcttctggctcattacaggtgatgacgatcgactgcgcctcttccgctcccgccgagcgcagcagctccagctgggtggcatcgccaaaatagactttatagccatagttgcgcatcagatttaccgcgctgatgtcccgctccagtaccgtaatacgcatcttattggccatcagcaggcgaccaatgacctgaccaaagcgaccaaacccgacaataatcacctgcggcttgtcatcctccacccacggcgcctcaccggtatcgtccgccggattcagccgtcgcgacaatagcttatctatccccttcatcagcagcggcgtcgtcatcatcgacaacgttaccgccaccagcagcagcgccatctggtcgtgctgaaacaatcgctgagaggcgggcagcgaaaagaggacaaacgcgaactcgccgccctggcttaatacgcccgcgaactgcatccgctcggaacttcgcaggccatagagacgggccagcagatagagcaccagcatttttaccgccaccagcaccgccacgctcaccgccacccacagcagatgggtatacagtacgccaaggttcagcgccatgccgacggaaataaagaacaacccgagcagcagccccttgaacggatcgatagcgatctccagttcgtggcgatactcactttccgccagcagcacgccggcaataaaggtgcccagcgccatcgacagccccagcgcctccataaacagggcagatccgaggaccaacagcagcgtggcggcagtgaacacctccctgacccccgagctggcgataaaacggaacaccggccgcaacagatagcgtccgccaatcagcatcccggcaaaggccaggaccttcatgccgaccgtcaaccagttcacatgctcatccgctgaaccggccagcaggggcaccagcgccagcgccgggatcaccgccagatcctgaaacagcagcaccgaaaagcctagctgtcccgcttcgctgcggctcattcccttctcacgcatcagctgcagcgccatggcggtggaagacatcgccaggccgatcccgccgaccaccgccgcctgccatgaaaacccggtcgtcatcagcaacccaccgaggatcgccgcgctgagcatcacctgcgccgcgccaacgccgaagatggagctccgcagtcgccatagcttggcgggattgagctccaggccgatgataaacatcagaaacactacgccgagctccgagaaatggagaatttcatccacatcgctgataaacccgagcccccacggaccaatggcgatcccggccagcagatagcccagcaccgcgccaatccccagtcttgcagccagagggacggcgatgacggccgcgaacaaaaacagcacccccgccagcagcaaatcagatcccgccatggacacctccggcggcgatggggttggccaaccagtcccggtaggccagggcgcggctgcgcagctcctctggctgctgcctccgggcccagtagacgataatggggctcatccagtgcatacggcacatgccggcggtcagttcaaaaggacgtaaaatatcgttcatcggatagcgattagcatcgcgacggtaggcgctctcaggctcgccggtagtgatcacgctgcgccagtactttcccgccagttcgttccctccggcgccgctggcgaagccgcggcttaacacacgatccagccactccttaagcagcgccggacagctccaggtatataaagggtgctggaaaacaatcacctcatgccggcgcagcaggtcctgttcgtaagcaatatcgataaaaaaatccggatagtgcgcgtagagatcgtgcacggtgacgttcggcaactgtaaggccggctctaataaaacccggttggccacggaatcctgagattctgggtgggcatacagcagcaacactttcgctgtctgagacatcattcccctcccgtaggtcttctggcggcctgcacagccccggcgttttgacacagccagaatgactttgtgtatcgtcttcgttttgggctaccatggcggcccggtgaagcgattcgcttccacactacattatcataatgacaaattaacatagtctgaacatacggcgccttatgattgttttctcctcgttacaaattcgtcgcggcgtacgcgtcctgctggacaacgccaccgctaccatcaatcctggccaaaaggtcggtctggtggggaaaaacggctgcgggaaatcgacgctgctatcgcttttgaaaaacgagataagcgctgacggcggcagtatgacctttcccggcaactggcagctggcctgggtgaatcaggaaaccccggcgctaccgcagccggcaatcgattatgtcattgacggcgatcgagagtatcgccagctggaggccgcgctccagcaggctaacgaacgcaatgacggtcatgctatcgccaccgtccacggtaagctggacgccatcgacgcctggactatccgttcgcgcgccgccagcctgctgcacggtctggggttcagcaatgaacagcttgagcggccggtcagcgatttttccggcggctggcgtatgcgccttaacctcgcccaggcgctgatctgccgctccgatctgctgctgctcgatgaaccgactaaccacctcgatctcgatgcggtgatttggctggagaagtggctgaagggctatacgggaacgctgatcctcatctcccacgatcgcgattttctcgatcctatcgtcgacaaaattatccatatcgaacagcagacaatgtttgagtacaccggcaactacagttcgtttgaagtgcagcgcgccacccgcctcgctcagcagcaggcgatgtacgaaagccagcagcagcgcgtcgcgcacctgcaaagctatatcgatcgcttccgtgccaaagccaccaaggctaagcaggcgcaaagccggatcaaaatgctggagcggatggagcttatcgctccggcgcacgtggataacccgttccacttcagcttccgccagccggagagcttgcctaacccgctgctgaagatggagaaagtcagcgccggctacggcgagcgtattattctcgactccatcaagcttaacctggtgccgggctcgcgtatcggcctgctgggccgcaacggcgccgggaagtcgacgctgattaagctcctggcaggcgagctccagcccgtaagcggcgagatcggcctcgcgaaaggcatcaagctcggctacttcgcccagcatcagctggaattcctgcgcgccgatgagtcgccgctgcagcacctggcgcgtctggcgccgcaggagctggagcagaagctgcgtgattatctcggcggctttggtttccagggcgataaggtgagcgaagaaacccgccgcttctccggtggagaaaaggcgcgcctggtactggccctgatcgtctggcagcgccctaacctgctgctgctcgatgaaccgaccaaccaccttgacctcgatatgcgtcaggccttaaccgaagcgctgatcgactttgaaggggcgctggtggtcgtatcgcacgatcgtcacctgatccgttccaccactgacgatctgtacctcgtccacgatggtaaagtcgagccgttcgacggcgatctggaagattatcagcagtggctcagcgactcgcaaaaacaggagtcccagagcggcgaggcgccaaaagagagcggcaatagcgcccaggcgcgcaaagatcagaagcgtcgggaagcggagctgcgcagccagacccaaccgctgcgcaaagagatcgcccgtctggaaaaagagatggacaagctcaacgcgcagttggccagtgcggaagaaaaacttggcgacagtgagctttatgacgcctcacgtaaagccgagctgaccgaatgcctgcagcagcaggccagcgcgaagtccgggctggaggagtgcgagatggcctggctggaggcccaggagcagctggagcgcatgcttcaggaaggctaaactcttcctcttcatcctgcctgcgcgtacgctgccgctggcagggtgggtttctgccctcttcatggcctggccatcagcgacatcaatgatttgtttttgctgtaagctggcgtcactggccgcaagaccacatattggctaaccccctgcatgccctgcgcggtatagtcatcatcacgtttattaattgttctggtgctatggttgaaatcatccccacagacatgacgccccccgaaaacgattcgcgtgagttccatccgatgcgcggcgtgggcaatcgtcatctgcaaaccatgctgccgcggctgattcgccgtaaattgcgctttaccccgcactggcagcgccttgagctgccggacggcgattttgtcgatctggcctggagcgaagacccgcaccaggcgcgccataagccgcgcctcgtcgtttttcacggcctggaaggcagtctgcacagcccgtacgcccatggtctgatccacgcggcgatgcagcgcggctggctgggcgtggtgatgcatttccgcggctgcagcggcgaacctaaccgcaatcaccgcatctatcactccggcgaaacggaagatggcacctggtttttgcactggctgaagcgcgagtttggtcccgcgccgaccgcggccgtcggctattcgctgggcggcaatatgctgggctgcctgctggcagaagaaggcgaccgctgcccgctggatgcggcggtgatcgtctccgcgcctttcatgctcgaagcctgcagctatcatatggataagggcttctcgcgggtttatcagcgctatctgctcaatctgttaaaagccaacgcttcacgcaagctgaaagcgtacccgggctcgctgcccgtcgatttacgccagctcaaagggatgcgccgcatccgggaatttgacgatatgatcaccgccaaaatccatggctttgccgatgcgctggattattaccggcaatgcagcgccatgccgcggctcagcgatatcactaagccgacgctcatcattcacgcgaaagacgatccgtttatggatcaccactctattccgccgcaggagcaactgccagcgaacgtagagtatcaattgaccgagcaaggcggccacgttggctttgtcagcggcactctgcgtaaaccggagatgtggctggaaagacgcattcccgactggttaaaccgctggctggaggttcccgtatgattattccctggcaggatctggatcccgaaacgctggataacctgattgaaagctttgtgttacgtgaaggcaccgattatggtgaacatgaacgttcacttgccgataaagtcgccgatgtaaaacagcagctgaaacgcggagaggcggtccttgtgtggtcggaagtgcatgagacggtcaatattatgccgcgcgcgctgtttaacggctaaggcgacgccactacatcgtttaaccagggagttgttatgtctgccaaacatccggtgatcgccgtcacgggctccagcggcgcgggcactaccaccaccagccttgcctttcgcaaaatcttcgcgcagctaaacctgcacgccgcggaggtggaaggcgatagctttcatcgctacacccgcccggaaatggacatggcgatccgtaaggcgcgggatcagggtaaacatatcagctactttggcccggaggcgaacgacttcggcctgctggagcagacctttgtcgactatggtcgccacggcaaaggtcagtcgcggaaatacctccacacctatgacgaagccgtgccgtggaatcaggtgccggggacctttaccccctggcagccgctgccggagccgacagacgtgctgttctatgaggggctgcacggcggggttgtcacgccgcagcatgatgtcgccagccatgtcgacctgctggtcggggtggtgcctatcgttaacctcgagtggatccaaaagcttattcgcgacaccagcgaacgcggccactcccgggaggcggtgatggactcggtcgtccgctcgatggaagattacatcaacttcattaccccgcaattttctcgcacccatatcaactttcagcgcgtgccgacggtggacacctccaacccgtttgccgccaaagcgatcccctcgctggacgagagctttgtggtgatccatttccgcaatctgcagaatatcgatttcccctggctgttggcgatgctgcagggctcgtttatctcgcacatgaacaccctggtggtgccgggcggtaaaatggggctggcgatggagcttatcatgacgccgctggtcgagcgcctgatggaaggccgtaagataggctaaccaaaaaaccccggcctggccggggttgagattcgatacaacggcaggcgaagactacgcctcgatcacttcataggagtgagtgatgttcaccgctttttccagcatcagcgccaccgagcagtatttctctgccgacaggtccaccgcccgggagaccgcggcatctttcagcgccttgccggtgacaataaaatgcagattaatatgcgtgaacagacgcggagcctcttcgcgacgctcggaggtcagcttcacttcgcaattggtcacgtcgtgacgacctttttgcagaatggagaccacatcgatcgcactgcaaccgcccgccgccatcagcaccatctccatcgggctgggagccttatccccggagttgccatccatcagaatctggtgtcccgatgcggactccccgataaaggttaacccttctacccatttcacacgcgcttgcataaaatttaactccagtatcgcaatattcctgtcagattacgcgcacataacaattctcgcaacggaaggcgacctgcgtcatgctgaagcgagacaccaggagacatgcggcgaaagctatgctaaaacagtctggatgctacagtaatacattgatgtactgcatgtatgcagaggagttcacattacgggctgtcgaaaaatcatcagccagcttcccaggtatagggaaacaatacgattgcatgcccggacgccgtgtagtgtcggcgcccggagatagcttataacagaggataaccgcgcatggtgcttggcaaaccgcaaacagaccctacccttgaatggttcttgtctcattgccacattcataagtacccatcaaagagcacgctgatccaccagggtgaaaaagcagaaacgctgtactacatcgttaaaggctccgtggctgtactcatcaaggatgaagaaggtaaagagatgatcctctcctacctcaaccagggcgatttcatcggtgaattaggcctgtttgaagagggtcaggagcgtagcgcctgggtacgggcgaaaaccgcatgtgaagtggccgaaatctcttataagaaattccgtcagctgatccaggtgaacccggacattctgatgcgtctctcttcgcaaatggctcgccgtctgcaggtcacgtctgagaaagtgggcaacctggccttcctcgacgtgacgggccgtatcgcccagacgctgctgaacctggcgaagcaaccggatgccatgacccacccggacggtatgcaaattaaaattacccgccaggaaattggtcagatcgtcggctgctctcgtgaaaccgttggtcgtattttgaaaatgctggaagatcagaacctgatttccgcgcacggtaaaaccatcgtcgtctacggcacccgttaagttgctaagcggcgtattgctcccgcagtacgccgtttttgtttttccctcatgtggcgcaggctgatttaccacccggaagtcaactatgcactgcggcaaacgctggtgctgtgtctgcccgtggccatcggtcttctgctcggccatctccagcaggggctgttattttccttagtccccgcctgctgcaacattgccggtcttgataccccgcataagcgctttttcaaacgcctgattatcggcggctgcctgtttgccggatgcagtctggtggtgcagttgctgcttgcccaggcgatacccctgccgtttattctcagcggcctggcgctcttgctcggcgttaccgcggagatcagttcgctgcacgcgcggctgctgcccgcgtcgctgatcgccgccatctttaccctgagcctggcgggcaatatgcccatctgggagccgctgctgatctacgccttcggcacgctgtggtacggcgtgtttaactggttctggttctggctgtggcgcgaacagccgctacgggagtcgcttagcctgctttaccgggagctggcggactactgtgaagccaaatacagcctgctgacccagcataccgatccctcgaccgccctgccgccgctgctcacccgccagcagaaagtggtcgatctgattactcagtgctatcagcagatgcatatgctggccgctaaccaacgcaacgatcataagcgcctgctgcgggcgtttcagatggggctggatctgcaggagcatatttcggtcagcctgcatcagccggaagaggtgcaaaagctggtggaacgcagccatgccgaagcggtgatccgctggaacgcgcagaccgtcgccgctcgcctgcgcgtgctggcggatgacatgctctatcatcgctttccaaagcgctttcagatggataaacagatcgaggctctggaaaagatcgccagacaacatccggataacccggtcggccacttctgcgcctggcacttcagccgcatcgcccgggtgctgcatacccagcgcccgctgtatgcccgggacctgatggccgacaaagagcgtcgtttaccgctattgcctgcgctaaagaactacctgtcgctaaaatcgcccgcgctgcgcaatgccgcccgcatcagcgtgatgctgagcgtcgccagcctgatgggcaacgccctgcacttgcctaagccctactggatcctgatgacggtgcttttcgtcacccagaacggctatggcgccacccgggtgcgtattgttcaccgggcggcggggacgctcgccggcctgacgatcgccgggctgaccttgcattttcacgttccggagagctacaccctgagcgggatgctgctgattaccctgctcagctatctgatcattcgcaaacactatggctgggcgatggttgggtttacggtgacggcggtatataccctgcagctgctgacgcttaacggcgaacagtttattatcgcccggctgatcgacacccttatcggctgcctgatcgccttcggcgggatggtctggctgtggccgcagtggcagagcggcctgctgaaaaaaaatgcccacgatgcgctggaggccgaccagcaggcgattcgcctgatcctcagcgccgatccaaaagcccccgcgctggcctatcaacgcatgcgcgtcaaccaggcgcacaacgcgctctacaactccctgaatcaggcgatgcaggaacccgggtttaatacccactatctggaagatatgaagctgtgggtgacgcacagccagtttatcgtcgaacacatcaacgctatgaccaccctggcccgggagcatacgatgctgaccccggatcttgcccagcgctatctcgaatcctgtgagattgcgctgcagcgctgccagcagcggctggacagcgatggtcccggcagcgcaggggatgccaatattatggagtcgccggaaagcgaggcgccgatcggtccgttaagcaccctggagcagcatctgcaacgcattctgggccatctgaacaccatgcacaccatttcgtcagtggcatggcgtcagcggccgcaccatggcatctggctgcggaagatcaaccgttaatcacctttgccaccgcctgggcaaagcgcgccatcccttcagtaatatcctgctcgtcgatgatcagcgagggaacaaaacgcatcacgtccggcccggcgttgagcaccatgacgccggcgtcggccgcggcatagaggaaatcacgcgcgcggcctttgtgctgcggcttgagttccgcgccgatcagcaggcccatcccgcgtatatcactgaacagatcaaactcggcatccagccgctgcaggtgtttgacgaacagttcgcgcttcgcgctcacgccatccagcaccgccggggtattgatcagatcgaaggcggcgttggcgaccgcgcaggccagcgggttgccgccgtaggttgagccatgggagcccgcatggaaggcgctggcgatctcgtgggtggtcagcatggcgctgaccgggaagccgccgcccagcgctttggcgctggtcagaatatccggggtcacgccgtagtgcatataggcgaacagcgatccggtacgccccataccacactgtacttcatcaaagacgagcagcgcctggtgctgatcgcacagctcgcgcagtccctgcaggaaagccggcgtggccgccgtcacgccgccttcgccctgaatcggctccaccaccaccgcgcaggtgtggtcatccatcaccgcttttaccgcctgcagatcgttgaagggaacatggacaatatccgccggttttgggccgaaaccatcggaatacttcggctgaccaccgacggaaacggtaaacagggagcggccatgaaaggcattatggaaggcgatgattttggttttatacgggctatggcgggtcaccgcatagtgacgcgccagcttaaaggccgtttcattggcttcggtgccggagttcataaacaccacgcgctcggcgaaggtagcctcgacaagtttacgtcccagacgcagcgccggctcattggtaaagacgttgctggtgtgccacagcgtttcgccctgctgatgcagcgccgccaccagcgccggatggcaatggccaagcgccgtcaccgcgataccgccggcgaaatcgatatactctttcccctgctgatcccagacgcggctgcctttccccttcaccgggatgaattctgccggtgcataaattggcaaaataacttcatcgaatgtggcgcgggtgattgccggttgttcagttgccatgtcttgcccatccctcttcgttacgcagatgcgattatgataatctaatcacaaaatatgcataaaaaatcagtcaatagcaactgaaaatcaccgtttcaaaaagttggccagcaattgatggccctgctcgctgaggatgctttccggatgaaactgcacgccctcgagatcccattcgcggtgacggatccccataatctcaccgctggcgctgcgggcagtgacgttaaactcggacgggagcgtcggcgggtcaatcaccagcgagtgatagcgggtcaccgtcaggggaatattcagcccctgaaacaccccttcgccgttatgctcgataagcgaggttttgccatgcatcacctgggccgcccgcacgatagtcgcgccaaacgcctgggcgatcgcctggtgcccgagacagacgcccagcagcggcgttttccccgcatagtggcggataaccgcgagggaaatccccgcctcatccggcgtgcaggggcctggcgagatcacgattttctccggcgccagcgccgctatctcctccagcgtcaacgcatcgttgcgcctgaccagcacttccgcccccagttcgcagaagtactgatacagattccaggtgaaagagtcatagttatcgataagcaggatcatagcggctccggaacaatcaaaaccgggctattctactcagattcccgcgcttcgcttaccactttgcgaaagatcgccaccagcggggccagatcgcccatcgcgctctgctggcaggccgcactccagccggcggggtcaacgtcacgccagttaagaaggtagccggcatgtatcgccagctgttcaaagaaaatacgctgggtcaggccattgccaagacgaaaagggtgcagcacattaatttcaccatagaaccagctcaggcgttcgatgaaggtatcgcgcggcaggccattgagataatcctcctgctcaagggcctgcatcagggcattcccctcctcctcgatccgggcaaagtggcagaacggcgtatcgcccaggtagaggttcacttcacgcaagcggcccgcccagtcaaacagatcctgatacaactgatgatgaatagcgcacagatagggtaagccgcgcacccgcgggcccagcggcagagtggccgcccgcagcgctgtcatctcaaaggcggcctgctgcagatttttagcctggcggatgccgagacggttgcgcagcacgttcagcgccggataaaggtaaggatcgcgttcatcgccgaatttatcgctcatactccctccgcaacgtcgccagacgcgccagcgcctcttcggcagtcagcgtaaccagcggcaccgtcacgccttcaaggcgacggctggcctgaaaattggtattgcgtgtctgttcccagagtcgggatttttgcttatcggtgagtggacgcatcgtcgccccccttatcgtcccctgtgtgccacaagtataagcagcaatttcaggttatgccgggaggcgaccgggcgcggcgatagaccaccgcgccgcgggaggattagggcagcactttcgcagagaggataacgaccggtttggtcggcacattctggtacggaccaacgttatgggtctggacctgggagatcttatccgcaacatccatccccttcaccactttgccgaataccgcatagccaaagtcgcgctggccatggtcgaggaaggcgttatccgccacgttgatgaagaactgactggtggcgctatcctgatcggcggtacgcgccatcgcgatggtaccgcgggtgttgcgcaggccgttgtctgcttcattcttgatcggcgggttaggctgcttctgctgcatctgttcgttaaagccgccgccctgcaccatgaatcccgggatcacgcggtgaaaggtggtgttgttgtagaagccgctgttgacgtacttcaggaagttatccacggaaatcggggctttctggctgtttaactcaagctcaatgttacctgccgaagtggtcagcagcacatgcggatcgccctttgccgccatggccggggagaacgctgaaatagcgaaaacggcagccatcgccgccagtgttgatttgagcatggaaattccttaacggagcagaataaaagcgagtgccttgattctaaagagcctttgcatcctgggccagccttttaccaaattttacttagctgtaataattgtaaccgcgcaaacgatctcctttgcagcgaacaagcgtgatacagatcacattaaaacatgcaaaagataacccatttcacaataaacatttaattacatcacctgaacgaataaaatctgtccgcccggcgcagcgtcaacgcgctttacctttctattcacaggccagtcatgactaacagcaaccgtattaagctcacatggatcagcttcttctcctacgccctgaccggcgcgttggtgatcgtcaccgggatggtgatgggtaacattgcggattatttccatctgcccgtttccagtatgagcaacacctttacctttctgaacgccggtattcttatctccatcttcctcaatgcctggctgatggaaatcgtgccgctgaaaactcaactgcgctttggctttattttgatggtgctggcggtggccggcctgatgctcagccacagcctggcgctgttctccgcgtcaatgttcgttcttggcctggtgagcgggatcaccatgtcgatcgggaccttcctgatcacccatatgtatgaaggccgtcagcgcggggcgcgtctgctgtttaccgactccttctttagcatggcgggcatgattttcccgatggtcgccgccgtcctgctggcgcgcagcatcgagtggtactgggtctacgcctgtattggtctggtatatgtcgctattttcgtcctgactttcggctgtgattttccggtgctgggcaaaaaagcccagagcgaaaacagccagccggtggtgaaagagaagtggggcatcggcgtactgttcctctccgttgcggcgctgtgctacatcctcggtcagctgggctttatctcctgggtaccggaatatgcgaagagcctgggcatgagcctcggcgacgccggtaaactggtgagcgatttctggatgtcctacatgatcggcatgtggtcattcagcttcatcctgcgcttcttcgacctgcagcgtatcttaaccgtcctcgccgggctcgcgacggtgctgatgtacctgtttatcaatggttcgccggagcatatgccgtggtttattctgaccctgggcttcttctccagcgccatttacacctcgatcattacgctcggttcgcagcagacgcgggtcgcttcgccgaagctggtgaactttatcctcacctgcggcaccatcggcaccatgctcactttcgtggtcaccggcccgattgtggcggccagcggtcccctggccgcgctgcacaccgctaacggcctctatgccgtggtattcgtaatgtgctttatcctcggcttcgtctcccgtcatcgccagaacaacgctcaggcggcgtctcactaagccttcggcccctttgcatccgcaagggggctgttcctcataaaagaaagctcctcgccaccgcggtcagtttggatccagctttgcgccggctgggtggtcgcgatcacccttccctggcgaattgaccagcgcaccggcacttggcagcggacggcctcaaagccattctccgccgggagaatgatcaggttagccgggttgccgctgacaatgccgtaatcctcgaggccaaacgtacgggcgctgttgtcggtgataagctgcaggccgtcgttgatctgctggtagcccatcagctggcaaacatggagccccatatgcaggacctgcagcatattgccggtccccagcgggtaccacgggtcaaagacgtcatcatgaccaaagcaaacgttgatccccgccgccaacagctccttcacccgggtaatgccccgtcgcttcgggtagtcgtcaaaccggccctgcagatgaatattcaccagcggattggcgacaaagttgatgccggagagcttaagcaagcggaacagacgcgaggtataagcgccattataggagtgcatagcggtggtatggctggccgttacccgcggccctatccccgctttcagcgccagcgcggcaacggtttcaacaaagcgcgactgctcatcgtcaatttcatcgcagtgaatatccagtgggcggtcatattgctgcgccagacggaaggcgatatgcagcgattccacaccatattcacgggtgaactcaaaatgcgggatcgccccgacgacgtccgcccccagcttgagggcctcctccagcagcgcctcgccgttggggtaagagaggatcccctcctgtggaaaagcgacaatctgtaactcgacccatggcgccacctcctgtttgacctccagcatcgccttcagcgccgttaacgtgggatcggaaacatcgacatgagtgcggacaaactgcacgccattggcgatctgccacttcagggttttccacgcccgggctttgacgtcctcatggctgagcagcgctttccgctccgcccagcgctcaatcccctcgaacagagtaccggactgattccagttcggctcgccggccgtctgggtggtatccagatggatatgcggctcgataaaaggcgggatcgctagcccgccgcgagcgttcaatacctcgtagctttcatcgtgcgcctcccccatcggcgtgatctcgccaaagcggcccttatcaatggctatttgccacaggccgtcgcggtctgccaggcgtacgttctgaatcaaccaaagcggcgctgctgtcatatcaccctctctattcaatacggcttgttttctgtctaaccccaatcgcggcttacccaattcttgtacacaaaatcagcaaaaaggaaaagtcagcgttttccatgacttataaaaatactgacaaatcaaacgcatacccattaagtggtaggtgaagttgtcattgatttgcatcaataagcctgatggctgaatcgttaaggtaggcggtaatagaaaagaaatcgaggcaaaaatgagcaaagtcagaatcgctattatcggtaacggcatggttggccatcgctttatcgaagagcttctcgataaggcgcctgccggacagttcgacattaccgtgttctgtgaagaaccgcgtatcgcctacgaccgcgtccacctgtcgtcttatttctcccatcacactgcggaagaactgtcgctggtacgcgaaggtttctatgagaaacacggcgtcaaggtgctggtcggcgaacgggcgatcaccatcaaccgccaggagaaagtgatccactccagcgccgggcgtaccgtgttctacgacaagctgattatggcgaccggctcatacccgtggatcccgccgattaaaggcgcggaaacccaggattgcttcgtctatcgcactattgaagatcttaacgccatcgaatcctgcgcccgccgcagcaaacgcggcgcggtagtcggcggcggcctgctcggcctggaagcggccggcgcgttgaaaaacctcggcgtggaaacccatgttatcgaattcgcgccgatgctgatggccgaacagctcgaccagatgggcggcgagcagttgcggcgcaaaatcgaaagcatgggcgtgaaagttcacaccagcaaaaacaccaaagagattgttcagcagggcaccgaggcgcgcaaaaccatgcacttcgccgacggtagcgagctgcaggtcgatttcatcgtcttctcaaccgggatccgcccgcgcgataagctggccacccagtgcgggctggcggtcgcccagcgcggcggcatcatggtcaacgatagctgccagacctccgatccggatatctatgccatcggggaatgcgccagctggaacaaccgcgtctacggtctggtcgcccccggctataaaatggcccaggtggccgtcgaccatctcctcggcagtgaaaatagcttcaccggcgccgacctcagcgccaagctgaagctgttgggtgtggacgtgggcgggatcggcgatgcccacggccgcacgccgggcgcccgtagctacgtctatctcgacgaaagcaaagaagtttataagcgcctgatcgtcagcgccgacaacaaaacgctgctcggcgcggtgctggtcggcgacaccagcgactacggcaatctgctgcagctggtgctcaacgccatcgagctgccggaaaacccggattcgctgatcctcccggcccacgccggcagcggcaagccatcgatcggcgtggataaactgccggacagcgcgcagatctgctcctgctttgacgtcagcaaaggcgacctgatcgccgctatcaacaaaggctgccacaccgtggcggcgctgaaagcggaaaccaaagccgggaccggctgcgggggctgtattccgctggtcactcaggtgctcaacgccgagctggcgaaacagggcatcgaggtcaacaacaatctgtgcgaacacttcgcctactcccgtcaggagctgttccacctgatccgcgtggaaggcattaaaaccttcgacgagctgctggaaaaacacggtcagggctacggctgtgaagtctgtaagccgaccgtcggttccctgctggcctcctgctggaatgagtacatcctcaagccgcagcacacgccgctgcaggacagcaacgacaacttcctcgccaacattcagaaagatggtacctattcggtgatcccgcgctcagctggcggcgaaatcacgccggaagggctggtcgccgtgggccgcatcgcgcgtgaattcaatctgtacaccaaaatcaccggctctcagcgcatcggcctgtttggcgcgcagaaagacgacctgccggagatctggcggcagctgattgaagcgggattcgaaaccggccacgcctacgccaaagcgctgcgaatggcgaaaacctgcgtcggcagcacctggtgccgctacggcgttggcgacagcgtcggcttcggcgtagaactggaaaaccgctataaaggcatccgcaccccgcacaaaatgaagttcggcgtctccggctgcacccgtgaatgcgcggaagcgcagggtaaagacgttgggatcatcgccaccgagaaaggctggaacctgtacgtgtgcggtaacggcgggatgaaaccgcgtcacgccgatctactggccgcggacctcgatcgcgatacgctcatcaaatatctcgaccgctttatgatgttctacatccgcaccgccgataagctgacccgcactgccccgtggctggacaatatggaaggcggtatcgactatctgcgcagcgtcatcatcgatgacaagctcggtctgaacgaccatctggaagaagagctggctcgcctgcgcgccgccttcgcctgcgagtggaccgagaccgtcaacaacccggcggcgcagacccgcttcaaacactttatcaacagcgaccagcgcgacccgaacgttcaggtggtgcccgaacgtgaccagcaccgcccggccacgccgtatgagcgtatcccggttactctggtggaggaaaaagcatgagccagtgggtaaatatctgcagcatcgacgacatcctgccggccaccggcgtctgcgccctgctcggtcagcagcaggtggcgatcttccgtccctaccatgacgacagggtattcgccatcagcaacattgatccgttcttcaacgccagcgtactgtctcgcgggattatcgccgagcatgacggcgcgctatgggtcgccagcccgctgaaaaaacagcgcttccgcctgagcgacggcctgtgcatggaagatgccagccactctatcgcccgcttcgacgcccgcgtgaaagacggacacgttcagcttaaagcgtaagtccttctccctccccccggccacggggggagatataagtaacagttctgaccgacagcgcatgagtgcgggatatgtcgcatgttttgtattacctttgctgctattctacgaccactcgttttctaccccttatttttatgaggttattctgtggatcacttacccatattctgccagttgcgccagcgcgattgtttactggttggcggcggggatgtcgccgaacgcaaagcccgtctgctgctggatgctggcgctaacgtcacggtcaatgcgctcgacttcacgccccagtttcaggtgtgggctgattcacagatgctaactctggtgcagggggagtttatcccctcgctgctggataactgctggctggccatcgccgctactgatgatgagacggtcaaccagcaggttagcgaggcggccgaagcgcggcgtatcttctgtaacgtggtggatgccccgcgccaggccagctttatcatgccgtcgataatcgatcgctcgccgctgatggtcgccgtctcctcgggcgggacatcaccggttctggcgcgcctgctgcgcgagaaactggagtcaattctgcccctgcatctcggccagctggcccgctatgccggccatctgcgcgcgcgggttaagcagcagtttgccaccgtaggcgagcgtcgccgcttctgggagaagctgtttgttaacgaccgtctggcgcagtcgctggctaatgacgatcggcaggcagtcgcggataccactgagcagttgctgacggagccgttggagcatcgcggcgaggtggtgctggttggcgccggccccggtgacgccgggctgctcacgctcaaaggcctgcagcagatccagcaggctgacgtggtggtctatgatcggctggtctccgatgacatcatgaatctggtgcgccgcgatgccgatcgggtgttcgtcggcaagcgctcaggctaccactgcgtcccgcaggaggagatcaaccagatcctgctgcgcgaagcgcaaaaaggaagacgcgtggtccggctgaaaggcggcgatccctttatctttggccgcggaggggaagagctggagacgctttgcgaggcgggcatccccttctccgttgtgcctggcattaccgccgcctccggctgctccgcttattcggggatccctttgacccaccgcgatttcgcccagggcgtccgcctggtcactggccacctgaaaaccggcggcgagctggactgggcgaacctggcggtggagaagcaaaccctggtgttctacatgggtctgaaccaggcgccggcgatccgcgagaagcttatcgctcacggcatggctgaagatatgcccgccgccatcgtcgagaacggcaccgctgtgacgcaaaaagtggtcagcggcaccttaggacaactggatattctggcgcagcagatggccagcccggcgctgatcatcgtcggccgcgtggtcggtctgcgggataaactgaactggttttcgaaccattaaccttgcctcccataaagtgacaggcataaaaaagggcgggatagcatcccgcccttttagctgttgcgtcgcttacggcttggcgacaaagccaatcgcttcgtataccgctttcagggtttgagaagcccgcgcgctggccttttccgcaccgtctttcatcacctgattgagaaacgcttcgtcgttacggaaacggtgatagcgctcctgcaggtcaatcagcatgcccgataccgcttcggcgacttcgcctttcaggtggccatacattttgccttcaaaatgctgttccagctcaggaatagttttcccggtaaccgcggagaggatatccagcaggttggagacgcccgctttctctttcagatcgtaacgcactaccggcggctcgtcggagtcggtgaccgcacgtttaatcttcttgaccaccgatttcggatcttccagcaggccgatgacgttgttgcggttgtcgtcggacttggacatctttttcgtcggctccagcagcgacatcacgcgcgcgccggatttagggataaacggctcaggcactttaaaaatatcgccgtagatggcgttaaaacgctgggcgatatcgcggcttagctcaaggtgctgtttctgatcttcgcccaccggaacctggttggtctggtacagcagaatgtcagcggccatcagtaccggataatcaaacagaccggcgttgatgttctccgcgtagcgcgctgacttgtctttaaactgagtcatgcggctcagttcgccgaaataggtgtagcagttcagcgcccagcctagctgggcatgttccggcacgtgcgactgcacgaagatagtgcttttctgcgggtcgatgccgcaggccagatacagcgccagggtgtccagcgtcgccttgcgcagctgctgcggatcctggcgcacggtgatggcgtgctggtccacgatgcaatagatgcagtggtaatcgtcctgcatgtttacccactgacgcagcgcacccatatagttgccaatggtcagttcacctgagggctgtgcgccactaaaaacgatgggcttagtcatgtttcaattcctgagtttcactgtgcggtaacccgagagcgggtaagagttcgttaaactggtcgaagagatagtccggctcgctcagcgcaagcggttcaccatagttataaccgtaggtcagaccaacagagcagcagcctgccgctttggccgcctgaatatcattgcgcgaatcgccgacaaacagcagctcggctggagccagagagagcttttccgccaccagcagcagcggttccggatgcggctttttattctgcacgtcatcgccgccaatcaccacggtaaaatatttcgcaatatcgagcgcgtccaacagcggggcgacaaacggcgtcggcttattggtaaccagcgccagcggcaggcctttggcatgcagcgcgccgagcgtatcggccaccgccgggaacaggaaactgccctcttccgccgcttcggcgtaatagcggtcaaacagtttacgcaaaatgcgcagctgctcgtcttgcggaatatcatgatcgtcgacagaaggcttacccatcgccgcacgtaacgttgctcgctcctgacgagcccaggtaagcgcccgctccatcaggacatcggcgccgttaccgatccaggtgataacgcgttcttctcccgccaccggcagctccagggcgtacagggcgttatcaaccgccgaggttagacccggcgcgctgtccaccagcgtgccgtcgagatcaaatgcgatgccgcggatcgcctgtaatttatccatgactcaccttcgctaattctatacgcatttgatcaatgacttgcttgtagtccggctgaccgaagatcgccgaaccggcaacaaacatatccgcacccgccgcggcgatttcgccgatattgctggctttcacgccgccatccacttcgaggcggatgtcgtagccggacgcatcgatgcgctggcgcacttcacgcagtttatccagcgtctggggaataaaggactggccgccaaagcccgggttaaccgacatcagcaggatcacgtccagcttatccatcacgtaatcgaggtagctcagcggcgtcgccgggttaaacaccaggcccgctttacagccgtgctctttgataagctgcaggctgcgatcgacgtgttcggaggcttccggatggaaggtgataatgctggcgccggcttcggcaaaatcaggaatgatgcggtcgaccggcttcaccatcaggtgaacgtcgattggcgcggtaataccgtaattacgcagtgacttcagcaccatcgggccaatcgtcaggtttggcacgtagtggttgtccataacgtcgaagtgcacgacatccgcacccgccgccagcgccttcgcggtatcctcacccagacgggcaaaatcagccgacagaatcgaaggggcaatcaaatactgcttcatccgcatctccttgaaatttatttggtcttaggcggacggtagagcgctaatagctcgtccacctttttacgcgtaccaccgttgctgctgatgctgcgccgcaccttcacaatatgcgtttctgccgcgtttttataccattcctgcgtcagcggcgtgcggtggttggaaatcagcaccgggatgcgctttttcatcagcgattccgccttttgcgccagcagtacctgttgttccaggttgaaactgttggtgtggtaggcggtaaagttcgccgtcgccgttagcggcgcatagggcggatcgcaatacaccactgtgcggctatccgcacgttgcatgcactcttcgtaagattcgcagtaaaactcggcgttttgcgccttctcggcgaaatgatagagctcagcttcggggaaatagggctttttataacggccaaacggcacattgaactcgccgcgcagattgtagcggcacaggccgttgtagccgtgacggttcaaatacaggaacagcaccgcgcgacgcagcggatcctggctttggttaaattcatcacgatacaggtagtagcgctcagcgacgttattttccggggtaaacatctcacgggcggcggcgacgtattcgtcggtgcgcagtttgacgatgttgtacaggccgattaagtcactgttgatatccgcgaggatataacgagaaaagtcggtattaagaaataccgacccggcgcccacaaagggctcgatcaagcactcgccttccggcaaatgctttttaatatcgtcaagcagggggaactttccccctgcccacttcagaaaagcgcgattctttttcatgctgcctaactaattacacgttctccggctgtggagaaagctccgacagcatcctgcgcttaagactaccccacggcattatttcaggtcagcctgaacctgatgcagcggttttgcccatggatttttcgcctgcacgtccgccggcagcgaggtgacagcacgtttcgcttcatctttcgatgcatagataccgctcaccagcacgtaccatggttggccgttacgcgacgtttcatagacaacatatttatccagcttctctttcttcgcccagttgttgaggttgtcgtagttagaggagctgctgagctgcagagtatagtgacccgacggcgcagttttcattgagctgacgtcacctgccgtcttcccggtcttcgctgccggcgctgccgcagctgccgttgccgctggcgctgcggtcgtcgtggtcggtttgctctgagcggtggccaccggtttgctttcgctgacggacgttttcgccggagcggtggtcgccgtgctttcaacatgcttcggctggaccggcttcgattctaccggcgttttcgccacggcctgtggcttcgactgcggcttcgcttcgataacggtatgcttacgttcagccggacgcggggtcgctgctgtctgacgctcggtcgcctggcgcggcgccgcggtgccattggcgccattccggattggcgcgacggtagccggttcagtcggcagcgtcgagttagccacggcgccgtccagttggccctgctgctgggtcaaggcattgttcagatcgccctgaacttcgatacgctgctggccctgcggcgcaaccgctgcctggccctgcgtcgggttcgcggcaataggcggtaccgttacgtcctgctgtgaggtgctgttagcggcggcagtctggtcctggccggcagcaggcatgctggcggactggtcgtcagacagattaatgctcttctcgccggaagcggtctgctggctggaagatgatggcgatttcagtgcggaaccgatacccacgatcaacagcagcagcaccagaatccccacacccatcatgatgtactggcgggaggccggtttggccggcgcttttttacgcttgcgcggacgacgctctacaggctgctcttcgagcatctcctcgtcttgcgcatccagttcttcttcgaactcttcctcttcacgctcgcgacgggccttaccagcgcgcgtcggacggccttcatcggcatcaagatcaacatcgtcaaaattgatctgcggatcggcatcacgctcggaagactgacgggaacgaccagcacgacgatcgttgcgatcggctttcatatcgtcttctggtttgaaatcatccatttaacaccccactaaaaggcttatgctcacgattattgcacatcacccgaaatgataacgccgcgcgaacgcggccagaccttcttattgttgcgcctgctgagtatcagcaatcgcgccaagaaccacatcgtgcggcactccgccgcgcagctcgctgcttcctattgcgagcgggagcaccagccgcatttcgccagccagtacctttttatcgcgcatcatatggggcaaatacgcctgcgcactcatttcctgcgggccgcgtaccggtaagcctgcacgcttgagcagatcgataatgcgctgagtatcctgcgcgcggaactgccccagccgttcggacgtgcgtgccgccatcaccatacctgccgccaccgcttcgccatgcagccagttaccgtagcccatttccgcttcgatagcatggccgaaggtatgtccaagattgagtaaagcacgtaacccggtttcacgctcgtcggctgccacaacctccgctttcagttcacagcagcggcgaatgcagtacgccatggcggtatcgtccagcgccagcagcgcatcaatgttgttttccagccagctgaagaattcaccatccaggatcaccccgtacttgatgacctcagccagtccggaagcgagctcgcgcttcggcagagttttcagacagttaagatcaactaccacggaaaccggctgccagaaggcgccaatcatgtttttgccgagagggtggttcactgcggttttgccgccgaccgacgagtcgacctgcgacaacagggtggtagggacctggatgaaacgcacgccgcgctgatagcttgccgcggcgaaaccggttaaatcaccgatcacccccccgccaagcgccaccagagtggtgtcgcggccatgtggtttttgcaacagcgcagtaaacacggtatccatcaccgccaggcttttgtattgctcgccgtctggcagaatgacgctgtcaacgttgacccctgactgctccagcgcagagcggacggtatccagataaagcggcgccagcgtttcgttggtgaccagcatagcctggtcgcccgacttgagtggcaggaaggaagctggatcgttaaacaaaccagccgcgatggtaatcgggtaactacgttccccgagggtaacagtaagcctctccataacgcgacatccacctcaatgactattactctgacgcacttttattaagccagaatcagttgctttccagcatatgaataatctggttcgcgacgactttcgcactctgatcgtctgtgcggatagtcacatcggcgatctcttcatacagcgggttacgctcgtcagccagcgcttccagcacttcacgaggcggcgcatcgacttgtagcaaaggacgctttttatcgcgctgcgtacgggccaactgcttctcgatcgtagtttccaggtagaccaccacgccgcgggcggagagacggttacgcgtttcacgggattttacagagccgccgccagtcgccagcacaatcccctgtttttccgtcaactcattgataattttctcttcacggtcacggaagccttcttcgccttcaacatcgaagacccagcccacatcagcgccagtgcgtttctcaatctcttgatcagaatcgtaaaattccatgttgagctgttgggctaactggcgcccaatagtgcttttgccggcacccataggcccaaccagaaagatattgcgtttctctgccattttttcggtactactaagactattcgttaatgataaacccgcttcgcagacacccagcgccgcagggcatgaactgaaacctcatatgcaatagagcgagagtcagactaaaaattatctcaatactccggctggtttggcaactgaataaaatcgccggacaataaagggaggattgatgtcgtacccgactctcaaatcggtaccccttgtatgctaaatccgtcctcacgtcaaacacctgaaacgtgtttagcatgaaaaacctgcttaacgtactgccagaatccgtggcgtaataaagacaaccagttcgcgacgttcattatctttcccgtcacgacgaaacagacgtcccagtaccgggatatcgccaagcagcgggacgctgtcgcgggcggttttgtttttctgcgaaaagatgccgcccaacgctaaagtctcgccgctgcgaacttccaccagggtctctatctcctgcttatcgatggccagcgcttcgccgttttcctgcttcagcacctggcctggcgtattctcgcttattcgcagcttaagccgcactcttccctgctgcagcaccgtcggcgtgacctccatgcccagcaccgcctctttgaactccaccgaagtggcgccgctttcgccactggaaacctgataggggatctcgcttccctgcttgatgctggcaggctgcatgtgggaggccaataaacgcgggctggcaataatttcgacctgctgcttgcgctccagcgcggatagctccagctcaagcaagcgaccgttgatcttgccgatgttaaaccctgcgcgggtgctggcatcgtttaccgatacatcgctgcttagggtggtgatttgcccggagcctggcgggcttccggcttccgcaagccgccacttcacccccagctcacgaaggctggtttcgctcatcgacacgatatgggcggccagctccacctggccgaccggcagatccatctcctgcgcccaggccttcaacgccggcaggtgccgggcatcatcgcggatcagcagccgattagtccgtttgtccgccatcaggtgtcccctggcgctgagcagctttccgccgcttttagccagctcctcagcgtcggcaaagtgcagggtcacgctctccgcctgcaggggcaggttctgcaggcgtttctcctgttcggcttcacgctgcgcctgatttgccttttgccaggcctgagtgtgcgcgtagatgaccgtcccctgctgttgcaaagagagacccgcgctatccgctaccgcccgcagcgcctggctccagggaaccttctgcagacgcagggagagcgtgccgctgacgtccggcgcgacgacgaggttcttatggttcatttcggccagggcttgcagcacctgggccactggcgcatcgtcaatcaccagcgaaaccggtttatcattgcgggcggcgggggccaccgccagcggcagcagcagaagcagcaggcttatccatcgcatcatgttgtttcccttcacgttgccagcgccacgctggcggttcacatcccgaagacgtgacgatgtccagctcaccggccgtcagccggctcacccgccagcccgtgggcaattgctcatccatgcgtacccgtcgccactttccgttcccatcctgcagaaaccccgtccagccagcctcatccccaaccgccccgccatagcgccattgcgaaagctgcgccgtgcggcagggatcctccaccggctggaaagggtcacgctcggccgccagcagcgacagcggtagccacaggaagatccagcgtttaccgctcatcttccgcctccagcagcagtcgcaggcggagcgtctgcgcctcacggcccagcgaaaacgaacgcggattcatcccgcagcgcgccagccaggaaaaaagcgcgggtaccgttgaccaggacagggtcagctccatctcgccgccgcttccctgcggacgccaggcgataagcttcgctccggagagcggaatggctatgggcgaaaatgactgcgtgtcgatgcgcgccccgggattttcctcgccggggatgcgcagcgccatgatccgccgccactgcgtttgcaacgccgcatcacgggttaccgccgcctgcggcgggcgcagatcgcgccagagcgccacgccgcctcccgacagccccattgcgagcaggatcggcagccccgtccaggcgccccgaaggttaatccgcatcagcgcgcgctcccgtcagggtaaaactgaactgccaacgcccctcggcgtcgcgctgggtcccgccggcttttgccggcgcgaatcccgcgacgcgagtcagcgcagcctccacgctggttagcgcctgcaggttaagggccaggccgtccagcgtgaggagtacgccctggtactccagccgcgtcagccacgcctgcgcgggcagatctgccgccagcgcctgcagcctgggttgccaggcggcgatcgccgatctgcgctggtactgctggcgctgccgttgatgctgctgccacgcctcacgcatcgcctgctcgcgctgcttaagcgaagcgagcagctgcgcgtcggccgtcgtgtgaagcgtcgccaggaagtcgcgctgcagacgcgccgttcggctcaccagcaggcccatcccgcccagcagcacaatgccgatggttaacaacaggacgtagcgcaggcgctggcggcgacgcaggtcgcgccagggaagaagattaacgacatgcgtcatgccgcccgcctcccagcgccagcccaagggcaatggcgtaacgatcgccatcggctggcagcgggggctgccgacggtgaatcacttgccagacatcaaagcgactggcctcatcgcccgcgtcaatacacaggcgcagcggaatctgaagctgccccgccagctggcttaaggacccgacatcagcgcaggcgtcgctgccccaggcctcacgggtcgcccacagccagcgcttttcatcccgccacgccaggccctggtctgccgcagtcatccaggggaaaaaggcgccgagcgcactggcatccggtacgatggccgccacccgcagccgcagccgccctgccagctcccgcagaacattgatatccagccgctgcgccgccgtaacctgccagccgtcatcccgcgaggtgggcgcataatcaatacatagcgcggaggcaggcattgccagctgctggctcatggcgctggctacccacgtcgcctgttcccgctcccgcagggcgaactggggatacggaagacgcttttgcagtgtgcgcaccgcgggaaaggcgatactaacctgatgctgcgccggtagctcccgccgccaggcggccagccgcgaaccgagtgcgctgacgtccgccaccattccctgacgcaccagccccggcggcaatgggatacgccaccagcggcgcagcgcccagtgtgaacgttcatgcaatagcgcgacaatggcaatgctatcctgttggatatgcattccaagccgccagtttctgaaagccatgcttacgatctccttatccggcaaaactgcccggctatatcaatgcacctggcttgcctttatactaccgcgcgtttgtttataaactgcccaaataaaactaaatgggaaaacaccggtgaagttcgtaaagtatctattgatccttgcagtctgttgcgtactgctgggagcaggctcgatttttggcctctacaaatacatagagccgcaactccccgacgtcgcaaccctgaaggatgtgcgtttgcagatcccgatgcaggtctatagcgccgacggtgagcttattgcgcagtacggcgaaaagcgccgtatccctgtgacgttgcagcaaattccccccgagctggtgaaagcgtttatcgccaccgaagacagccgcttctatgagcaccatggcgtcgatccggtaggtattttccgcgccgccagcgtggcgatgttttcaggccacgcctcccagggcgccagcaccatcacccagcagttagcgcgtaacttctttctcagccccgagaagacgttgatgcgtaagattaaagaggcctttctggccatccgcatcgagcagttgctgaataaagatgaaatccttgagctgtatctgaacaagatctacctcggctaccgcgcctatggcgtcggcgccgcggcgcaggtctattttggcaaacctatcgaccaactgaccctgagtgagatggcggtgattgccggtctgccgaaagcgccttccacttttaacccgctctattcgatggatcgcgcgaccgcccgtcgcaacgtggtgctgtcgcgtatgctgagcgaaggatacatcacccaggcgcaatacgatgaggcgcgcagcgaacccatcgacgccagctatcacgcgccgaaaatcgccttctccgccccttacctgagtgaaatggtgcgccaggagatggtgaatcgctacggcgagcaggcctacgaagatggttatcgggtctacaccaccattacccgtaaaaaccagcaggcggcccagcaggcggtacgcaataacgtgctggattacgatatgcgtcacggctaccgcggcccggccagcgtactgtggaaagtcggcgaaacgccgtgggagacgaagaagatcgtcgattcgctgaagcgtcagtctggctacggtccgcttttcccggcggtggtcacctccgcgaatgcccaggaggctgtcgcgctgttggctaacggcgactccgtttcgctgacgatggagggcgtgcgctgggcccgtcgctttatctcagatacgcagcaaggggcgaccccgcgtaaagtcaacgacgttgtgcaggccgggcagcagatctgggtacgcaaggtgggtgacagctggtggctgtcccagctcccggacgtcaactcagcgctggtctccattaacccgcaaaacggcgcgattattgcccttgtcggcgggtttgactttaaccagagcaagttcaaccgcgccacccaggcgctgcgccaggtcggctccaacattaaaccgttcctctataccgccgcgatggataaaggcttaacgctggcaagtatgctcaacgatgtgccgatctcgcgctgggatgcgggcgcaggttccgactggcggccgaagaactcgccgccgcagtatgccggtccgattcgtttacgccagggcctggggcagtcgaaaaacgtggtgatggtgcgcgctatgcgcgccatgggcgtagactacgccgccgagtatctgcagcgctttggcttcccggcgcagaacattgtccacacggaatcgttggcgctgggctcagcctcctttacgcccctgcaggtcgctcgcggttattcggtgatggccaacggcggcttcctggtcaatcctttctttatcagtaagattgagaacgatcagggcggggtcctcttcgaggagcgtccgaaaattgcctgtccgcagtgtgatttaccggtaatttacggcgatacgccaaaatccaacgtgctggaaaacaaggatgtggaagatgtcgccacctccgcggaaccgcagaatggcaacgtgccgccgcagccgcagctggagcaggccaaccagtcgctggtcgcgcagagcggcgcacaggaatacgcgccgcatgtgattaacacaccgctggccttcctgatcaagagcgcgctgaacagcaacatctttggcgagccgggctggatgggcaccggctggcgcgccggacgcgatctgcagcggcatgacatcggtgggaaaaccgggaccaccaacagctcgaaggacgcctggttctcaggctacggaccgggcgtggtgacctcggtttggatcggctttgacgatcatcgtcgcgatcttggccggaccaccgcctccggagcgattaaagatcagatctctggctatgaaggcggtgccaaaagcgcccagccggcctgggacagctttatgaagagcgtgctggaaggcgttccggaagaaccgttaactccgccgccgggtatcgtcacggtgaatatcgaccgcagcaccggtcagttggcgaacgggggcaatagccgggcggagtactttattgaaggaacccagcccacccagcaggcagtccgtgaggtgggcaccaccctgactgacggcggcggtgaaacccacgaattgttctgacaaaaaaagcgcctgcgggcgcttttttattgctgcttagcgtggacgctcgttcagagtcggccctgggcctgcagccattcccgcactaaaaacagcgcgctgacgttacgggcctcgttaaaatcttcttcatccagcagcgacatcagctgcgccagcggccagcgcacctgcggtagcggctcaggttcatcgcccggcagtgactccggatagagatcttccgccaccatgatattcattttgctggagaagtaggagggggccatactgagcttcttcaaaaacgtcagcttattggcgccatagccaacctcttctttcagctcgcgattggccgcttcatccacggtttcacctggatcaatcagccctttggagaagcccagctcgtaggactccgtccccacggcatactcacgaatcaaaataatgtgatcatccacaatcggcacaatcatcaccgcttcacgggtggaaggccgcatacgttcataaacgcgacgcacaccgttgctgaactccagatcgacgctttcgacattaaagaggcgcgaacgggcgacagtttcaacattgagaatggtgggtttttgtaatgatttgctcattgtcatcggtctatgctgtgattaagcagtcattgtgcgatacgcaacacgctttcggcaatccaaattgctacttatttacagagttgcaaccttttccctgcagggggaaaagtaataaagataaaaaagtcaatagcttgaattcgctttgagaatttaccgatttctgcgctttaacgtttttggtaagcttgtgcgctgctgcatgacatattcactaccctgtaagcaggtgcgccgctaacactgcagcttgacgttagtcttcacgttcaccgacgatttcgtaagaaaaaaataactttgatgggatgggcatgggcacctttctgatattccttacagctctgctaatctgcgtattgctcatcggatggtggtatcgcgctcacgccagacgccgccgactccccctactgcacgcctttagcgacgctaccacgcggcagcttcctgcggatgagcgccaggctattgagaagtatgttgccgagttgagccacgcccagcaggtgccggcgtccggtgcgaccagcgcgcctgtcgctctggcgctcaacgaacagagtgataccgtctatgcggtgacacgcgccatcacccgctacgggatcaccaccgacgcgccgaataaatggcgctatttcctcgattcggttgaagttcatctgccgccgttctgggaacagcatatcaacgatgaaaacagcgtcgagctgatccccaccgacagcctgccgctggttatcacccttaacggtcatagcctgagcgactatcgccaggaagcgcaaagctacgccctggaacgcgcttcggccacccaggcctccattcgcggcgaagagagcgagcaggtagagttgcggcagatccgtcgggaaacgcctgaagaacacgctctgaatcgcccggacgggctgcgcgaagcgatcctgatcgtcgcctcctttctgttcttttatttcagcctgattgggccagctgtctttaccccctggctggtcgccgcaggtttgttgctgctcgccgccggactgtgggggatttatgccccgccgcgtcgcgccgcgctgcgcgaaatccattgcctgcggggcgtccctaagcgctggggattgtttggcgaaaacgatcaggagcaaatcaataacatctcgctgggcattatcgatctcatctatccgcgccactggcaaccctggattgcccaggacctggggcagcagaccgatattgatatctatctcaaccgccacgtggcccgtcagggacgctacctgtcgcttcatgatgaagtgaaaaacttcccgctgcagtactggctacgcagcgcgattatcgccgccggcgccctggtggtggtgattatgctgtgggccagcgtaccgttgaatatgccgtttaagttcaccctgtcgtggctgaagggcgcgcaaacgattgaagccactaccgtcagccagctggaaaaagcccatgtgcgcattggcgatacgctgcgcctgaccggtaccgggatgtgtaatatccgcacgccgggcagttggtccgccaaagaggattcgccgttcctgcctttcgattgttcacagattgtgtggaacgacgcccctcctctgccgctgccggagtctgacattgtcagcaaagcgaccgccctgatgcagtccgtccagcgccagctgcacccggaaaccgacgatgattcccgcgtcagccctgccctacgctccgccattcagaaatcaggcatggtgctactggatgatttcggcgatatcgtgcagaaaactaacgatctctgctcggcaaaggatgattgcctgcggctgaagaatgcgttggtcaatcttggcaatacccgtaactgggaaacgttaaccaagcgcgccaccgccggcaagctggatggcgtgaacgtgctgctgcggccggtcagcgccgagtcgctggagaatctggtgaccacctcaaccgcgccctttgtgatacgcgaaacctcgcgggccgcgcaggcgctgaacagcccggctcccggcggttttcttatcgccagcgatgagggcagcgtattggtcaatcagccgtggccggcggtgagtctgtatgattatccggcccatgagcagtggggcgaactgcggcggctggccggtatgctcatgcatacccccttccatgccgaaggtatcgttaccaacctgtttactgacgccaacggcacgcagcatatcaacctgcatcgcatccccgaccgcagcggcctgtggcgttatctgggcatcaccctgctgctgctgtcaatggtggggtgcatggcttaccacgccgtgcaggccctgcgtcgttatcaacgccatcgtcagcgtatggaagagattcagaaatattacgaaagctgccttaatccggttttgctcccctcagctgactcgcaagattaattttcccggcgacagggtgtgataccctgtcgcccattttccgctcgctggagagtcatcatgcactttgatatcgcctggcaggaggtcgataccgttctgctggatatggacggcacgctcctggacctcgccttcgacaactacttctggcaaacgctggtgcctgaaacctggggggccgcccgcggcctcaatttgcaggaggcgaaagacgccatgcgccaggagtatcacgccgtgcagcatacgctaaactggtactgtctggattactggagcgagcgcctgggtttggatatttgtgcgatgaccagcgaacaaggtccgcgcgccacgctgcgcgaggataccgtgccgttccttgatgcgctcaaggcctgcggtaagcgacgcattctgttgactaatgcccatccccacaatctggcggtgaagctcaaacacaccggcctggacgcgcaccttgatttattactttccacccacacatttggttatccgaaagaggatcagcgtctgtggcgcgccgtggcggaggaaactggccttgaggcgcacaaaacgctgtttgtcgacgacagcgaggcgatactggatgccgcgagggagtttggcattcgttactgcctgggtattaccaatcctgactccggactggcggaaaagcagtatctgcgccatccggggctgaatgattaccgacgactgatcccttcgcttaccccgaaggagaggcgatgaaagagaagcccaccgaaaccgtcagactggacaaatggctttgggccgcccgcttttacaaaacccgcgcgctggcgcgggaaatgattgaaggcggcaaggtgcattacaacggacaacgtagcaaacccggaaaaattgtcgaactcgacgccatgctgacgctgcgccagggcaacgacgagcggacggtgcgcattatcggtattaccgaacagcgccgcccggcaagcgaagccgtcaacctgtatgaagagacagcggagagtatcgagaagcgtgaaaaaatggccctggcgcgcaaaatgaacgccctgaccatgccgcaccctgacagacgtccggacaagaaagagcgccgcgacctgatgagatttaaacacggcgagagtgaataactcgcgccagaaagagagatgattatgactcaacacgatcaattacatcgttatctgtttgaaaactatgccgtgcgcggcgagctggtgacggtgtcggaaaccctagaacagattctggcgaatcacacctatccccaaccggtcaaaacggtgctggcggagctgttggtcgccaccagtctgctgaccgcgacgctgaagtttgccggcgacattaccgtacagctgcagggggatggccctttacagctggcggtgatcaacggcaataaccagcagcagctgcgcggcgtagcgcgcgtgcagggcgagattgcggacgatgcggatctgaaaacgatggtcggcaacggctacctggtcattaccatctctccggaagaaggtgagcgctatcagggcgtggtcggtctggaaggcgatacgctggccgcctgcctggaagattatttccagcgttcagagcagctgccgacgcgccttatcatccgcaccggcgatcatgaaggccagccgatggcgggcgggatgctgctgcaggtgatgccggcgcaggatgcccagactgccgacttcgagcacctggcgacgcttaccgagaccattaaggcggaagagctgttcaccctgccggcaaatgatgtgctgtggcgtctgtaccatgaagaagaagtcacggtctacgacccgcagagcgtggagttcaagtgcacctgctcccgcgaacgctgcgccggcgcgctgaagacgctgccggatgaagagattgatagcatcctcgccgacgaaggcgaaattgatatgcactgcgactactgcggtaaccactatatcttcaatgccatggacatcgccgagatccgtaataacgcctctccggccgatccgcaggttcattaatccccgcatctttctcaggcacagggcggcaatgttgtttgtcgcgttgtgcctgacttttaatttattcgcgagttgaatcgattttccctgaaagagttacgtaatttaatttcaggaaagcgattacattcacatttcggcagtttttttaattactttttaaccattgagaaacatctaaccccaccatccgcccatttcctgagataatccactccacttcgtgacaggagtcaccgtttttatcgtcattctgaggaatgtcgagatacgtaaatctatgagcctggtcgcggtcaatacccggcaattaaccctacaatttacagcagtacatcttggctaaggagcagtgacatgcgcgttaatcatggtttaaccccgcaggatctcaaggcttatggtatcaatgacgtccaggatatcgtccacaaccccagctacgacatgttgtttcaggaagagctcgacccgaacctggaaggctacgaacgtggcgtattaaccactctgggtgctatcgccgtcgacacgggcatttttaccggtcgttctccgaaagataagtatctcgtgcgcgacgacaccacccgcgacaccgtctggtggtccgataaaggcaaaggtaaaaacgacaacaagccgctttcgcaggaaacctggcagcatctgaaagggctggtgacccagcaactgtccggtaaacgcctgtttgtcgtcgacgctttctgcggcgccaacgccgatacccgtctcagcgtacgtttcattaccgaagtggcctggcaggcgcacttcgttaaaaacatgttcatccgtccgagcgatgaagagctggctgaattcgagcccgacttcatcgtgatgaacggcgcgaaatgcaccaatccgcagtggaaagagcagggcctcaattcggaaaacttcgtcgccttcaacctcaccgagcgcattcagttgatcggcggcacctggtacggcggcgagatgaagaaagggatgttctcgatcatgaactacctgctgccgctgaagggcatcgcctccatgcactgctcagccaacgtcggcgagaaaggcgatgtcgccattttcttcggcctctcaggcaccggcaaaaccaccctctccaccgacccgaaacgccgcctgattggcgatgacgaacatggctgggatgacgacggcgtgtttaacttcgaagggggctgctacgccaagaccatcaagctctctgaagcggccgagccggatatctatcacgccatccgccgcaacgccctgctggaaaacgtggtggtacgcgccgacggcacggtcgatttcgatgacggttcaaagaccgaaaatacccgcgtctcctaccccatcgaccacatcgacaacattgttaagccggtgtctaaagcgggtcacgccaccaaagtgatcttcctgacggccgatgcgttcggcgtcctgccgccggtctcccgcctgaccgccgaccagacgcagtaccatttcctgtccgggtttaccgccaaactggccggcaccgagcgcggcgtaaccgaacccacgccaaccttctccgcctgcttcggcgccgccttcctgtcgctgcacccgacgcagtacgccgaagtgctggtcaaacgcatgcaggcggctggcgcgcaggcttatctggtcaataccggctggaacggcaccggcaagcgcatctcgattaaagatacccgcgcgatcatcgacgccatcctcaatggctcgctggacaacgcggagacctttaccctaccgatgtttaacctgcagatcccgacggcgctcccgggcgtggatacccacatcctcgatccgcgcagcacctatggttccccggagcagtggcaggaaaaagccgaccagctggcgaagctgtttattgagaattttgagaagtataccgatacgccagcgggcgccgcgctggtggcggcaggaccgcagcgctaacgggcgcaaaggtgaaaaagccgggcttgcccggctttttattgtgcaacatcctgagtagctaaccgcgggcgcgatcagctctccctggcgggtttcatcggcgtcagcatccggtgcaccggcagccaggcgcggatcagtaacccgccgcgttcgctggagccaatctccagccggccgttgtgattgtcgataatacgctgaacaatcgccaaccccagcccggtgccgctggtgctgcgggcgctgtcgccgcgtacaaacggctgaaacaggtgctccctctgctcaggtttaatccccggtccatcatcttctacctggaaccaggcccggctcgcttcgctgccgctgctgaccttgatccagccattgccatagcgggccgcgttgaccaccatattcgccagcgcgcgcttgatagacagcgggtgcatacgtaccggaatttcgccggcctgcagggcggtggcgatttcccgctcatagccgctctccgcagcgatcacttcccccagcaccgcattcagatccgccagctccatcggcatctcctgcccggtgcgcagatagtcgataaactgctcgatgatggcgttgcactcttcgatatctttgttgatcgactccgcgagatagccgtcctgctcgcccatcatctcggtggccagacgaatgcgggtcagcggggttcgtaaatcatgactgaccccggccatcagcagcgtacggtcatcagccaactgcttcacgcccgccgccatatggttaaaggcgcgcgtcaccgaacgcacttcggaggcgccatactcgcgcagcggcggcggaataatgccgcgcccgacctgcagcgccgcgtgctccagatccaccaacgggcggttctgaatacgaataaacagccaggcgccgcctatcgccagcagcatgatcgccagggtatagcggaacagcggcgagaagtcgccctgatggatctcggtcagcggcacccgcacccagatattgggcgacagccaggtcttcagccacaccacaggggagcttttattgacctctacccgcacctctgtggggccaccaagctgatgggccatctgctgacttaagaattcataatgctgcgcccagcgcaggcctgcgtcttccgccgcttcattggaatagagcgaaatccccagctcgcgataaatttcacgacgaaacgccgggggcaccaccagctgggtgccatcctccagctgcagtttgtcggtcatcagcatacgcacttcgtaggctaacactttattaaactgctggagactcggcaggatcgcgaaattcagtaccaccagataggtcgtcaccaggctgacgaacagcaaggtgacgatcaggagcagtgtgcgagcaaaggagctgcgcggcgaaaagcgcacgcgtttcatgccttagaaccgtccgggacgaagacgtagcccagaccccagacggtctggatgtagcgcggatgcgccgggtcctcttccaccatgcggcgcaggcgggagatctgtacgtcgatggagcgctccatcgcagagtattcgcggccgcgggcgaggttcatcagcttatcgcgcgacagcggctcacggggatggctcaccagcgccttcaggaccgcgaattcgccgctggtcaacggcatcggctcgtcttcacggaacatctcgcgggtacccaggttcagtttgaatttaccaaaggcgataaccgcctcttcctgcgacggcgcgcccggcagctcgttcgcctggcgacgcagcaccgcccggatgcgggccagcagttcgcgcgggttaaacggcttcggaatatagtcgtcagcaccgatctccaggcccacgatccgatcgacctcttcgcctttcgccgtcaccataatgatcggcatcgggttactctggctgcgcagacgacggcagatagagagaccatcttcgcccggcagcatcagatccagcaccatcaggtggaaggattcacgggttaacagacgatccatctgttcggcgttcgccacgctacgaacctggaagccctgctcggtcagataacgctcgagcagcgcacgcaggcgcatgtcgtcatccacaaccagaatcttataattctcttgcattgtttgtactcccaaaggttcactgcaatagtcagtgcgtattctcaaaaaagcccggcgcgctcaccagctaaatctggtatatattccaggctaaattgttacaaagcatatttaacagcaggttaagtatacatttaatcataagacacagtatttatcctgtcggtattattacgcgctacaaattgtgcgcaacgacagacagtcagaaggttgaactcacgatgaaaacgccgctgatcacccgcgagggatatgaaaaactgaagcaggagatggactacctgtggcgccaggagcgtccggaagtgaccaaaaaggtgacctgggccgccagcctcggcgaccgcagcgagaacgcggactaccagtacaacaaaaagcgcctgcgggagatcgatcgccgggtccgctatctgaccaaatgtctggaacagttgaaaatcgtcgattactcgccgcaacaggaaggtaaagtcttcttcggcgcctgggtagagattgaaaacgatgaaggcgatatcaagcgctttcgcatcgtcggttacgatgaaatttttggccgcaaagactatatctccatcgactcgccgatggcgcgcgcactgttaaaaaaagaggttggcgatctggccatcgtcaacacgccggcgggcgaagccagctggtatgtcaacgagatcgaatacgttaaatagacaagaactttccgagagacgcccggcgcggctggtatttttagccgtcagtccgtataactagtccctgttttttgaccctaaagatgaattaaaagccatgatgaatgattcgctctgccgcattattgcgggtgaacttcaggccagagccgaacaggtagaagctgccgttcgcctgcttgatgaagggaacaccgtgccgtttattgcacgttatcgtaaagaagtcaccggcggtctggatgacacgcagctgcgtaatctggaaactcgcctcggctatctgcgcgaactcgaagaccgtcgtcaggcgatcctcaaatccatcgctgaacagggcaaactgaccgacgcgctggaaaaagccatcaacaccacgctcagcaaaaccgaactggaagatctctacctgccctacaagccgaagcgccgtacacgcggccagatcgctatcgaagccgggctcgaaccgctggctgacctgctgtggaacgaaccggcccacgatccggaagcggaggccgcaaaatatattgatgccgataagggcgtagccgacagcaaagcggccctggacggcgcgcgctatattctgatggagcggtttgccgaagacgccgcgctgctggcgaaggtccgtgactatctgtggaaaaacgcccacctggtctccaccgtcgtcagcggtaaagaagaggaaggcgctaaattccgcgactacttcgatcaccatgaaccgatcgccaccgtgccgtcgcatcgcgcgctggcgatgttccgcggtcgcaacgaaggcgtcctgcagctctctttaaacgctgacccgcagtttgacgagccgccgaaagagagccacggcgagcaaattattatcgaccacctgggcctgcgcctgaataacgccccggcggacagctggcgtaaaggcgtcgtcagctggacctggcggatcaaagtcctgatgcatctcgaaaccgagctgatgggcaccgtgcgcgaacgcgcggaggacgaggcaatcaacgtcttcgcccgcaacctgcacgatctgctgatggccgcgcccgccgggctgcgcgccaccatgggactcgatccgggcctgcgcaccggggtgaaagtggccgtcgtcgacgccaccggtaaactggtcgctaccgataccatctatccccacaccggccaggccgccaaagcggccgtcgccgtcgccgcgctgtgtgagaagtacaacgttgagctggtggccatcggcaacggtaccgcctcgcgtgaaaccgagcgtttcttcctcgacgtgcagaaacagttcccgaaggtcaccgcccagaaggtgatcgtcagcgaagccggggcttccgtttactccgcctccgagctggcggcgcaggagtttccggacctcgacgtgtcgctgcgcggcgcggtctccatcgcccgccgtctgcaggatcccctggccgagctggtgaaaatcgacccaaaatccattggcgtcggccagtatcagcacgacgtcagccagacccagctggcgcgtaagctggacgcggtggtggaagactgtgtgaacgccgtcggcgttgacctgaacaccgcctccgttccgctgctgacccgcgtcgccggcctgacccgcatgatggcgcagaacatcgtcgcctggcgcgacgagaatggtcagttccaaaaccgccagcagctgctgaaagtcagccgtctggggccgaaagcctttgaacagtgcgcgggcttcctgcgtatcaaccacggcgacaaccctctggatgcctccaccgttcacccggaagcttacccggtggtcgaacgtattctggccgccacccagcaggcgctgaaagatctgatgggcaatagcagtgcgctgcgccacctgaaggcagtggacttcaccgatgagaagtttggcgtcccgacggtcaccgacattatcaaagagctggaaaaaccgggccgcgatccgcgtccggagtttaagaccgcgaagttcgccgatggtgtggagaccatgaatgacctgctgccgggaatgattctggaaggtgccgtcaccaacgtcaccaacttcggcgcgtttgttgatatcggcgttcatcaggacggactggtacacatttcgtcgctttctgaccggtttgttgaggatccgcacaccgtggtgaaagcgggcgacatcgtcaaggtcaaagtgatggaagtcgatctgccgcgtaagcgtatcgccctgaccatgcgtctcgacgagcagccgggcgacagcaacgcccgccgcggcggtggtcaggagcgcccgcagggtaaccgcccggccgcgaaagccgccaaaccccgcggtcgcgaggcgcagcctgccggcaacagcgcgatgatggatgccctcgccgcagcgatgggtaaaaaacgctaaactctccctgcccctttttcaggggcagttttttttcatgaccaggccatcgccatcacgcgcaaaacagcttcagttgtttctgataacctacttttattccacgcctgaaaggcagcgaaattaatattttcatttcgttaacttcagaaaccttaattaaacattagatcgccgaaataatatttcgcgcatttttgattacaggctgactttgcggcatatcaataaaaaggtgattttcactttaaaaatagcctgcagcgcatcatatgtattgatgataaaaaccattctcattatcatcgattacagaacgttttttcttttttcgttggctacggtccccggcgcaactgcctccaggcgtccggaaaattcttcttcggttagcgatagacaagtaggccctatgcaattcacacctgatagtgcgtggaaaattaccggtttttctcgcgatattagcccagcataccgtcagaaactgctctccctcggcatgctgcccggttcctcttttcatgtggttcgcgtggcgccgctcggcgatcctgttcatattgaaacccgacgcgtcagtctggtattacgcaaaaaagatctcgccttaatcgaactggaagcggttgcacaataacggctggcccggcacaagagtctgaaatatgcaaaaattaaccgttggtttaattggtaatcctaattccggcaagaccaccttatttaatcagctgaccggcgctcgccagcgcgtgggcaactgggctggggtgaccgttgagcgtaaagaggggattttcgccaccactgaccaccaggtcacgctggtcgacctcccgggaacctactccctgaccaccatctcctcgcagacctcgctggacgagcagattgcctgccactacatcctgagcggcgacgccgacatgctgattaacgtggtcgatgcctccaacctcgagcgcaacctctatctgacgctgcagctgctcgagctggggatcccctgcgtcgtcgcgctgaacatgctggatatcgccgaaaagcagcaggtgcggatcgatatcgacgccctcgccgcccgtctcggttgcccggtcattccgctggtatcgactcgcggacgggggatcgaagcgctgaagatcgccctcgaccgtcatcaggcgaacagcgatcttgagctggtccactatccgcagccgctgctgcgcgaagctgacctgctggcgcagcagatgtcagcgcagatcccgacccggcagcggcgctggctgggtctgcagatgctggagggcgatatctacagccgggcctatgccggcgacgccgccgataaactggatatcgccctggcgaatctcagcgacgagatcgacgacccggcgctgcacatcgctgacgcgcgctatcagaccatcgccgccatttgcgacgccgtcagcaataccctgaccgccgaaccaagccgcttcaccgccgcgatggacaaagtgatcctcaaccgcttcctcgggttgccgatttttctctttgtcatgtacttgatgttcctgctggcgatcaacatcggcggcgcgctgcagccgattttcgatgccggctcggtcgcgatctttgtgcatggcattcaatggctgggttacaccctgcacttcccggactggctgaccgtgttcctcgcccaggggatcggcggcggtatcaacaccgtgctgccgctggtgccgcagatcggcatgatgtatctgtttctctccttccttgaggactccggctacatggcgcgcgccgcctttgtgatggatcgcctgatgcaagccctcggcctgccggggaaatccttcgtcccgctgattgtcggttttggctgcaacgtgccgtcggtgatgggcgcccgcacccttgacgcgccgcgcgagcgtctgatgaccattatgatggcgccgtttatgtcctgcggcgcgcggctggcgatcttcgccgtcttcgcggccgccttctttgggcagaacggcgcgctggcggtcttctcgctctatgtgctgggcattgtgatggccatcctcaccggcctgatgctgaagcacaccattatgcgcggcgaagcctcgccgttcgtgatggagctgccggtgtaccacgtcccgcatatcaagagcctgattatccagacctggcagcgcctgaaaggctttgtgctgcgcgccgggaaggtgatcgtcatcgtcagcatcttcctcagcgcgctgaacagcttctcactgagcggtaaggtcgtcgacaacatcaacgactccgcgctggcctcggtgagccgggtcattacgccggtgtttaaaccgatcggcgtgcatgaagataactggcaggccaccgtcggcctgtttaccggcgcgatggcgaaagaggtggtagtgggtacgctgaacaccctctataccgccgaagatatccagaatgaggaattcaatccgcagaccttcagtctcggcgaagaactgctcgccgccgtcgatgagacatggcagggactgaaagacaccttcagcctcagcgtcctggccaaccccatcgaagccagcaaaggcgatggcgaaatggccaccggcgccatgggggtgatgggcagtaaatttggcagcgcagcggcggcatacagctacctgatcttcgtcctgctctatattccctgcatctcggtgatgggcgccatcgcccgcgaatcaagccgcggctggatgaccttctccatcctgtgggggctgaatatcgcctattcgctctcgacgctctattaccagaccgttagctttagcgatcacccgcgctacagtctggtatgtatcctggcggtagtgttgttcaacgtggtgctcttcggcctgttgcgccgggcgcgcagccgggtggacgtctcgctgctggccacgagaaaaacgccggtctcctgctgttccagcccggctggcgattgccactaaggagggactgtggcgtcgttaatggaagtccgcgatatgctggccctgcagggccgcatggaggcgaaacagctcagtgctcgcctgcagacacctcagccgctgattgacgccatgcttgagcgaatggaagccatgggtaaggtggtccggatcagcgaaacgagcgagggctgcctctccggcagctgtaaaagttgccctgaagggaaagcggcgtgccggcaggagtggtgggcgctgcgatgaaaggagtcaggccaggtcgcgcaacgaggtaaaacgagtaagacagctatgaaaaacgggccagcaggcccgttttcttatgactggattatttataaacgtcagcgttcgcgtgtacggttttttcgtttttctgcccggcaatcacaacaaagtatttcccacccagctcatcggcttttttcgacagatcgcggcgggcgtccatcggcgacgtcgtcctggaggtcgtaatgctaccgaccttggtcagattcatcttcgccacgtcttctttttggatctctttcgcggcgaatgcgccgaaagagagggtgcctatcaccagagatgcaaccattcctgtaacaagtttcatagcctctactctccataaggttgttattgtaggtcacggtggcggattgaaataatcaaccaccgtaacaacctaagtattgctaggaatggcccttttaccatggcgcggcaaaaaaaattaccccagccgcgtcttcagcgccagcagcggctcgcagaaggccgcgggatgggaaacaaacggcgcatgcgcggccttatcgaagaggattgactcgctttccggccacaggtcatccagcaacgggacgatcttgcgcggcaccagtccatccagccggccatacagccgcagaaacggcatcggcagcctgaccagcgcctgacgcagatcgacggttctgaggatctccagtccgccattcagcgccgcggcggaaggcatcggcagcgagagcaccgcctgctttaacgcccgcgcatcctgacgcgcgctctctgtgcccatggtttgcagggcgaggaatcgctcgacggtgcgctggaaatcgtcgctcagctgctgctgaaatccggccagcacctcgggcttgatgccgagccagtcgtcacgagccgcgaaacagggggaagaggcgaccgtcaccagcgcctgcacgcgttccggacgcataatcgcgacctggctggccaccagcccgcccaggctccagcccagccacaccgcctgtggaggggcctgctccagcacccgctgcgccatcgcctccagcgacatcgccccaaacccgccgctgcgcccatagcccggcagatccaccaggtggagggtaaaatgcgaagccagctgcggcgtgatgcaatcccatacctgagcgttcagcccccagccgtgcagcagcacaagatgacaatctccttcgccgattgtttgccaccagatgtcgttcatccgttaccgttctctttttactggacagaaggccaaatatgctaacagcacacagcttatgctggctatgccaaatgccgctggcagtcgcccgctgggggatctgctcccgctgcagccgcgccctgctcgcctgtcccccgctctgcccgcagtgcggcctgccggcggcggcatcccgtcacccctgcggccgctgcctgcaaaagccgcctccctggcattggctggtggcggtcaatgactatcgcccgccgctgagcggtctggtgcagcagctgaagtttcaccatcgcccggagctgggccccgccctcgcgcgtctgctgctgcagcgccttctgcagcgtgacgatttgccgccagtagacgctctggtcggcgtgccgctatggcatcgccgtcgctggcgccggggttataatcagtgcgacgaactgtgccgaccgttagcccgctggcgaggatgcgtctggcatcgcgaaggcctgactcgccagcgagccggcgccgtccaacattcgctcaatgcccgccagcgcaggcagaacctgaaaaatgcctttcagcttgaatttgccgtgcagggactccatatcgctctggtggatgatgtcgtcacgaccggcagcaccgtcgccgagatatcccgcctgcttttgcgaaacggcgccgcgacggttcaggtatggtgtttgtgccgtaccttgtagacccccgctgatgggcgtattataacccagtaaaatagtcaactattaggccaacgctatgatccgtatttccgatgctgcacaagcgcactttgccaaactgctggcaaatcaggaagaagggacgcaaattcgcgtatttgtgattaatcccggcaccccaaacgctgagtgcggcgtatcctactgcccaccggatgcggtggaagacaccgacacggcgctgaaatttgaacagctgaccgcctatgtcgatgagctcagcgcgccctatctggaagacgctgaaattgatttcgtcactgaccagctcggctcgcagctgacgctgaaagcgccgaacgccaaaatgcgcaaagtctctgacgatgccccgctgatggagcgcgtcgagtacctgctgcagtcgcagattaacccgcagctggcgggccacggcggccgcgtatcgctgatggagatcaccgacgacggtctggctatcctgcagttcggcggcggatgcaacggctgctcgatggtcgacgtgaccctgaaagaaggtattgaaaaacagctgctgaacgagtttccggagctgaaaggggttcgcgatctgaccgagcatcagcgcggcgagcactcctactactaagcccttcctccggcggcaccctgccgccggtcctccctggccctttctgtgttaccgcgcaacatctcccgctaaacgaccggcaaaaaccggggaaagagtatgacttaagtctcatatttaacattttcccccgtcaggtgattctcaaccctcacatgttacccgtatcatccatttcaggcgccaccggcaaaaaaatagccagctatcctttctctgggtaaggataatgcaagcgtttacggcgccagactattttgctccctgacggagcggatgctctacaggttcgaactttgacgttacccataacaaattaaggccaggtaaatcatgccattagtcatcgttgctatcggggttgccctgttgttgctgttaatgatccgtttcaaaatgaacggcttcattgcgctggttctggtggcgctcgccgtcggattaatgcagggtatgccactggataaagtgatcgtctccatcaaaaacggcgttggcggcacccttggcagcctcgcgctgatcatgggcttcggcgctatgctcggtaagctgctggcagactgcggcggcgcccagcgtatcgccaccacgcttatcaataagttcggtaagaagcatattcagtgggcggtggtcctgaccggcttcaccgttggcttcgccctgttctatgaagtgggcttcgtgctgatgctgccgctggtgttcaccatcgccgcctcggcccgtattccgttgctgtacgtcggcgtaccgatggcagccgcgctctccgtcacccacggcttcctgccgccgcatccgggtccgaccgcgatcgccaccatcttccatgccgatatgggcaaaacgctgctctacggcaccattctggctatcccgacggttatcctggcgggaccggtgtttgcgcgcttcctgaaagggatagataagccgatcccggaaggcctgcataacccgaaagtgttcactgaagaagagatgccaggctttggcgtcagcgtctggacctcgctggttccggtgatcctgatggcgatgcgcgccgtggctgagatgatcctgccgaaaggccacgccttcctgccaattgccgagttcttcggcgacccggtgatggccaccctgattgcggtactgattgccctgttcaccttcggtttgaaccgcggccgctccatggagcagatcaacgataccctgacctcttcgatcaaaatcatcgccatgatgctgttgatcatcggcggcggcggcgccttcaagcaggtgctggtggatagcggcatggataaatacatcgcctctatcatgcacgaatcgaacatgtctccgctgtttatggcgtggtctatcgccgcggtgctgcgtatcgcgctgggttcggctaccgtggccgccatcaccgcgggcgggatcgccgcgccgctgatcgccaccaccggcgtcagcccggagctgatggttatcgccgttggctccggcagcgttatcttctcccatgttaacgatccgggcttctggctgttcaaagagtactttaacctgaccatcggcgagaccatcaagtcctggtcggtgctggaaaccattatctcagtctgcggcctggtgggcagtcagcagctggcctttacccaccaggaggcgaaacaatttttcgactgtcgtctgacatcgcctatcgaagccgacgacagtagccggctgtgcgacgatgtcgccgggtgggccaccgcgctacaactcatcgccctctccgcccgccagaataactcctccgcccaacactccgcccgccgcctcgccgggattaacgccagccatctgtcggattatctggtggatgaagtgctggataacgttgacgcccgcacgcgcaactttttgctgaagagttctctgctgcgctcaatgaacgacgcgttaatcgtgcgcgtcaccggcgaagagaatggccagatgcagctggaggaaatcgaacgccaggggctgttcctgcagcggatggatgattccggcgaatggttccgctatcacccgctgtttggcagcttcctgcgccagcgctgtcagtgggagctggcggttgaactaccggagatccaccgcgccgcggcggaaagctggatggcgcaaggtttccccagcgaggcaatccaccatgcgctggcggccggcgatgccaaaatgctgcgcgatatcttgctcaatcatgcctggggcatgtttaaccatagcgagctggggctactggagcagtcgctggcggcgctgccatggtccaatctgctggaaaatccgcgcctgatcctgctccaggcctggctgatgcagagccagcatcgctacagcgaagtcaataccctgctggcgcgcgccgagcaggagatgagtgtggaaatggacaccgcgatgcatggcgacttcaacgcgctgcgcgcacaggtggcgattaacgatggcgaccaggacgaggcggaacgtctgtcaatggtggccctggaagagctgccgctggccaactattacagccgcatcgtcgccacatcggtgcatggcgaagttctccattgtaagggaaagctgaccaaatccctcgccgtgatgcagcagaccgaacagatggcccgccgtcacgacgtatggcattacgccctgtggagcatcattcagcaaagcgaaatcctcttcgcccagggcttcctgcaggccgcctgggagagccaggagaaagccttccagctggtacgcgaacagcatcttgagcagttgccgatgcatgagttcctgctgcgcatccgttctcagctgctgtgggcatgggcgcgcctcgacgaggctgaagcttgcgcccgccaggggatggacgtgctatccacctatcagccgcagcagcagctgcagtgcctggcgctgatggtccagtgctcactggcgcgcggcgatctggataatgcccgcagccacctgaaccggctggaaaacctgctaggtaatggtcactatcacagcgactgggtctccaacgccgataaggtgcgagtgatctactggcagatgaccggtgataaaaccgcggcggccaactggctgcgccagacgccaaagccggagttcgccaacaaccacttcctgcagagccagtggcgcaacatcgcccgggcgcagatcctgctgggcgatttcgaaccggcggaaatggtgctggaagagctgaacgaaaatgcgcgttcgctgcgtttgatgagcgatctcaaccgcaacctgctgctgctcaatcagctgtactggcagtcgggacgcaagagcgaagcgcagaaagccctgctggaagccctgacgctcgccaaccgcaccggttttatcaaccactttgtgattgaaggcgaggcgatggcccagcagctgcgccagctgatccagttgaacacgttgccggagctggagcagcatcgcgcccagcgtattctgcgcgacatcaaccagcatcatcgccacaaattcgcccactttgacgaagggttcgtcgagcgactgctgaatcatccggaggtgccggagcttatccgcaccagcccgctgacccagcgcgagtggcaggtgcttggcttaatctattccggttacagcaacgagcagattgccggcgagcttgacgtggcggccaccaccatcaagacccacattcgcaacctgtatcagaaactgggcgtcgcccaccggcaggacgcggtacagcatgcccagcagttacttaagatgatgggatacggcgtctgacgacgccgttgccgtttagcacagctccagctgaaggttgttatcagtgatcaccttcagcacgccggccggcggcagcacgtcggtatagaccgcatcgaccatactgatgctgcccatgttgaccatcgcattgcggccaaacttggtatggtccaccaccagcatcacgtggcgtgaattctcaatgatcgcccgcttggtgcgcacttcatgataatcaaactccagcagcgagccatcgctgtctacgccgctgatgccgagaatgccgaagtcgaggcggaactgcgagataaagtcgagggtggcttccccgatgatcccgccgtcccggctacgcagttcgccgccggcgagaataatgcggaagtcctctttcaccatcagcgtgttggcgacgttaaggttattggtcacaatccgcagatcgttgtgatcgagcagggcgtgcgccaccgcttccggcgtggtgccgatatcaataaacagcgtcgccccgtccgggatctcgctggccacccgccgggcgatacgctctttctccgccgtctgggtcgctttgcgatcgtgccaggaggtgttcaccgagctggagggcagcgccgcgccgccgtgatggcggaggatcattttctgttcggctaaatcgttcaggtcgcggcggatggtctgcgggcttaccgcgaactgctcaaccagctcttccgtgctgacgtaaccctgtttttttaccagctcgataatggcgtcatgacgttgtgtttgtttcatgaaatatccctggaaaaatatcgcctacccgacccctgtcggtaagtctttatgcgcgttttcgcccatgtaaggtatcaacaaacgccatcgccaggccggtcgccagaccagccacgtgcgcgccgttggcgatcgccatgccgaaaacatcaaaccagccagcaattaaccacactaaagagaagagtatcaacccgcgctgcagataaataccgctctgcggatcgcgctcgccccgcagccagacgtagcccatcagcgcgtagaccacgcccgacaagccaccaaaccacgggccgctaaactggtgctgcacgaagccgcttagcagagcgctgatgacggtgatcaccaccagcttgccgctgccgatgcgcttttccaccgcgccgccaagataccaccaccatagcaggttgaagagaatatgcatcagcgagaaatgcatgaaagcatggctgaaatagcgccaggcttcgaactgcagcgaaggatcgtagggccaggccagccaaatcatcaccggctgatcgcccagcagattttgcaggatgaacaccgcgatgcagatcagcagaatcgcccaggtgaacggaccggcgttatgccgcagcgtggcaaagaaaggaaagcgctgatagcgcaacccgctattggtctgtccggactgccagctcgccgccagatagcgcgggtccgccgggttttcgagaaaacgcgccagctcagccctgacgcgcccggcctgactctcatcagccagccagacgtcgctctgggtatgctgctggatggtcaggataatcccctgcgtcgccatataatcgacaaacgcctgggccacccgcgggttggcaaaagaggtaatcattaacatgcagcgaatcgcttattccacacaaagggggatagtatacctgccagtcgttaaaacgtcccgcgcgccacttccgccgggaaatggcgatgccaggcgtcgaacccgccgtcaacgctatagaccttatcaaacccctgctgcagcagatactgcgcggcgcccttactgctgttgccgtgatagcacatcaccatcaccgccgtgtcaaagtcgttgtcacgcataaacgcgcccagcgtatcgttggtcagatgaaacgcgcccggcgtatgacccatcgcatagctttgcggatcgcggatatcgaccagtaccgccgtctgctgatgcagtttctggtgcgcttcttcaacattgatgcattcaaactgttccatgattctcttctctttctcgtcatgacgggcgatggccggcccaattttaccctgtagtgtaccgtcaggcggtaaagaaacgccaatatgttacacccatcacttcaaaatgtttttttgatgttaccaaaagcgcgtttgtttgctatagtgagcgatatcgagcatttatgagcttaaacgaaagtgtgagagggtaagaacgtggaaaccaaagatctgattgtgataggcggaggcatcaacggtgccggtatcgcggcagatgccgccgggcgtggtttatccgtactgatgctggaagcgcgcgatctcgcctgcgccacctccagcgccagttccaaactgatccacggcgggctacgctacctcgaacactatgagttccgtctggtcagcgaagcgctggccgagcgtgaagtgctgttaaaaatggccccgcatatcgccttcccgatgcgctttcgcctaccgcatcgcccgcatctgcgcccggcatggatgatccgtatcggcttgtttatgtacgatcatctgggcaaacgcaccagcctcccgggatccaccgggttgcgttttggcgcagaatcggtacttaaaccggaaattgtgcgcggtttcgaatattccgactgctgggtcgacgatgcccgcctggtgctggccaacgcgcagatggtcgtccgcaaaggcggcgaagtgcgtacccgcacccgcgctatctcggcgaaacgtgagaatggcctgtgggtggtggaagcggaagatattgatagcggtgagaagtttacctggaaggcgcgcggcctggtcaatgccaccggcccatgggtcaaacagttcttcgacgaagggatgcatctgcgctcgccttacggcatccgtctgatcaagggcagccacatcgtggtgccgcgggtgcatacccagaaacaggcttatattctgcagaacgaagataaacgcatagtatttgttattccgtggatggatgagttctctatcatcggcacgacggacgtcgagtataagggcgatccgaaagcggtggccattgatgataaagagatcaactatctgctgaacgtctataacgcgcactttaaaaagaccctcagccgggacgatatcgtctggacctactccggcgtccgtccgctgtgcgacgacgagtcggattcgccgcaggccattacccgcgactataccctggatattcacgatgagaacggtcaggcgccgctgctgtccgtcttcggcggcaagctgaccacctatcgcaaactggccgagcatgcactggaaaaactgaccccctattacaaagggatcggcccggcatggaccaaaaccgcggtgctccccggcggcgatatcggcggcgaccgcgacgactacgcggcaaaactgcgccgtcgcttcccgttcatcagtgaatcactggcccgccattatgcccgcacctacgggagcaacagcgagtggatcctgaaggaagccagcgccctgagcgatctcggggaagatttcggccacgagttttatgaagccgagctgaaatatctggtggagcacgagtgggtgcgcagcctggatgacgccatctggcgtcgaaccaaacagggtatgtggctgactgccgagcagcaggcgcgcatcagcgaatggctggcgcagcatgcgggaaagtctgaactgtcgttagcgtcctgacatcgcgtggcgccaggagagaaatacccgggctatggcttgcgcttggcccggatacctgttcacaaattaaacgagactttttttccagtcggcaatgtgacatttatactgagttctccccccaatgccgcaatgtagcgttttagggtcgaaagccgagggtcgttatcagcctgttccattttagcgatcgttggctgctttacccccatagccgcagccatctctgtttgcgacatttgcaactcttctcgaagcaagtttaaagcgacagactggcgtatctctgccgctttcgctgcaatacgctgctggctatcaggactctgtttcgccatgagttcttttagcgtggccattatcgctccttagtcaggtgttggctgaattctctgtcagccagagtaatcatctctttgtaaaaacgtttctcattcatgccatccttatcgcccgcacataaaacgatagctttccgcagaggatcaaaagcaaaaaaggcgcggatggggagcccatgatgctgaacccggagttctttcatattctgaaacgttgaatctttcaccgtatcaacatacgggcgcccaagctgcggagcaaactcagacaggatgagaatcgtggccaacatatcctcttttaaagctctactttgtaattcgaaccaggtatcaaacgtatccgtcgtttctacatcccacataggctatgaacgtaaacttattgagcatttatcgtactgctggcgaattcacgtcaatagtatattcccgcaatagcctgaatcctccccggcacttttccgaataaaacgttcgccacacaacacaacggggccaaatggccccgttgtgttgtgtggtgttgcattgactggcttacagccttaccgggtcgatatgccagatatatttcgcgtactcctggatcgtccggtcagaagagaagtagcccatgttggcaatattcaacattgccttataagcccactcttccgggttttgatacagctcgtcgacgcgatcctggcagtccacatagctacgatagtccgccagaacctggtagtggtcgccaaagttaatcagcgaatccagcaggtcgcggtagcgccccggttctgccgggctgaagacgccggtaccgatctgcgtcagcgcctggtggagctcttcatcctgctcgtaatattcgcgtggtttatagccgctgcgacgtagctcctccacctcttccgcggtgttaccgaagataaagatattctcttcgcccacgtgctcctgcatctccacgtttgccccatcaagggtgccgatagtcagcgcgccgttaagggcaaacttcatattactggtgccggaagcttcagtgcctgcgagggagatctgttccgacaggtctgccgccggaatgatcagctgcgccaggctaacgctgtagttggggataaagacgaccttcagcttgtcgccaatctgcggatcgttattaatcaccgccgccacatcgttgatcaggtgaataatgtgcttggccatgtagtaggccgaggccgccttaccggcgaaaatattcacccgcggcacccactcggcctgcggatcggccttgatccggttatagcgggtgatgacgtgcagcacattcattagctgccgtttgtattcatggatacgtttgatctgcacatcaaacagcgccttcggattgaccaccacattgagctgttgagcaatatagctggccagccgctgtttgttctcaaacttggcctgacgcaccgcctgattgaccatcggatagtcgatatgctgtttcagctcatcaagctgactcagatcggtccgccaggtgcggccgatatgctcatccagcactttcgacagcggcgggttggccagcgccagccagcggcgcggcgtcacaccgttggtcacgttgataaagcgcattgggaagattttggcgaattcggcaaacagtgactccaccatcagtcgggaatgcagctcggacaccccgttgaccttgtggctgaccactaccgccagccaggccatccgcacacggcggccgttagactcgtcgataatcgaggtgcggctgaggaggtcggtatcgttcggatactgctcctgcaaagtcttgaggaaatagtcgttaatctcgaagataatctgcagatggcgcggcagaattttacccagcatatccaccggccaggtctcgagcgcttcgctcatcagggtgtggttggtataggagaagacctgacaggtcacctcgaacgcctcgtcccagctgaacttatgttcgtcgataagcagacgcatcagctccggtatcgacagcaccgggtgggtgtcattcaggtgaatggcaatcttgtccgccaggttgtcataggtcttatgcaacatgtaatggcgactcaggatatcctgcaccgtggccgacacgaggaaatactcctggcgcaggcgcagctcgcggccggagtaggtcgagtcgtccggatagagcacgcgggagacgttttcggagtggtttttatcctctaccgcggcgaagtagtcgccctggttgaatttaccgaggttaatttcgctactggcctgcgcgctccacagacgcagtgtgttggtggcgtcggtgtcaaagccggggatgatctggtcgtaggcttccgcaatgatctcctccgtctcaatccagcgggttttctttccttcctgctgaatgcggccgccgaagcgcactttatagcgggtgttgtggcgctcaaactcccacgggttaccgtactccagccagtagtcaggagactctttttgtcggccatcgacaatattctgtttaaacatcccgtagtcgtagcggatgccgtaaccgcgtcccggcagacccagcgccgccagggagtcaaggaagcaagccgccagacggcccagaccgccgttgccaagcccggggtcattctcttcatcgatcagctcttcgagatcgagccccatctccgccagcgcgctgctcacatcgtcataaatgcccagcgacagcagcgcattcgagagggtgcggccgatcagaaactccatcgacagatagtacacctggcgcacttcctgggagagctgcgcgcggttggagcgcagccagcgctccaccatgcgatcgcgaacggcaaacagcgtggcgttaagccattcatgcttgttggcgatggccggatctttaccgatgataaacatcagtttataggcaatagaatgctttaacgcctcaacgctcagcgtcggtgatgcatagctaaagggtacattcataacaatgactccagtggttacatcaagcgttgataaagttcgcgataggagttcgcggcaacctgccagctaaaatccatattcatcgcctgacgctgcacgtagcgccagagcgacgggcgcgaccagaggacaaaggcgcgacggatagcgcgcagcaatgacagcgcattgctgtcctcaaagacaaaccctgtcgccagaccatcggccagattctccagcgaactgtcagcgacggtgtccgccagaccgccggtgcggcgcaccagcggcagcgtcccgtacttcagaccatacagctgggtcaggccgcagggttcaaagcgactcgggaccagaatgacgtcggcgccgcccataatgcggtgggagaaggcctcatggtagccaatctgcacacccactttgcccgggtgttcggcggcggcggcgaggaaaccttcctgcagcaccggatcgccggcacccagcagcgccagctggccgccctgctcaagcagacccggcagcgcttcaagcaccaggtccagccctttctggctggtaagacggctgacgacggcaaacaacggcgctttatcatcgaccttcaggcccatggcaatctgcagctgacgcttgttctccgccttctcctccagcgtgtcgcgatcgtagcgcatcggcagcagcagatcgttttgcgggctccagataccgtcgtcaacgccgttgagaattcccgacagccgaccttcatgatggcgctggcgcagcagcccctccatgccgtaggcgtactgcggctcggtgatctcgcgcgcgtaggtcgggctcaccgccgtaatatggtcggcgtagtagaggccggccttgagaaacgagatctgcccgttaaactcgaggccatgcatgttatagaacgaccacggcagctcaatgtcattcatatgccaggagtaaaacatcccctggtacgccaggttgtgcacggtaaacaccgatttagccgggcgtccgcgcgccgccaggtaggccggcgtcaggccggcgtgccagtcatgggcatgcaccacatccgggcgccagaacggatccagtccgctggccatttcacttcccacccagcccagcagcgcaaagcgcaggacgttgtcgggataagcgtgctggttggtatcgtggtaagggctccccggacggtcatagagatgcggggcgtctatcaggtagatccccacgccgttaaagtggccgtacagcagcgtgatccgcccggcgaaggtatcccggcgggtcaccacctgggcatccaccacgccgcgacggatatcgggaaacgccggcaacagcacgcgcgtatcgataccctccgcgatttgcgccgccggcagtgcgccgatgacgtccgccagaccgcccgtctttaacagcgggaacatctcagaacatacatgtaagacctgcattagcgctcctgtttgtgccctaatttccgcagcatgtcgcgggtcaccagcacgataccttcctctgagcgatagaagcggcgtgcatcctcttccgcattctcaccaatcaccattccttccgggataacacaggcgcggtcaatcacgcagcgacgcaggcggcatgagcgccccacccagacatctggcaacaagactgccgaatcaatgttacagaacgaattcacccgcacgcgcgggaacagcaccgactgcaccaccaccgacccggagataatgcaccccccggaaaccagcgagttcagggtcatgccgtggctaccggagcggtcctgcacgaacttcgccggcggcagcgattccatatgggtgcggatcggccagttctggtcgtacatatccagctccggcgtgactgacgccagatcgaggttagccttccagtaggcttccagcgtccccacgtcgcgccagtaaggttcggcgttcgggtcggattgcacgcaggagagcgggaaaggatgtgcataagccatgccagcttcggtgatcttcggaatgatgtctttgccgaaatcgtggctggagttctcgttgcgatcgtcttcttccagcagctcataaagataggcggcgtcaaagacataaatgcccatgctggccagcgatttggtcgggtcggtcggcatcgccggcgggttggcgggtttctcgacaaactcaatgattttttcgttttcgtcgaccgccatgacgccgaaggcggatgcctcttcaatgggcaccggcatgcaggccacggtgcaacgcgcccctttttcgacatggtcgatcagcatgcgcgagtagtcctgcttataaatatggtcgcccgcgaggatcaccacgtactcggccttgtagcggctgatgatatccaggttctgcgtcaccgcatccgccgtgccgcgataccaattttcgccatgcacgcgctgctgagccggcagcagatcgacaaactcgttcatctcttcgctgaagaacgaccagccgcgctggatgtgctgcaccagcgtgtgcgactgatactgggtaataacgccgatgcggcggatccctgagttaatgcagttagataatgcgaaatcgataatacggaacttgccgccaaagtgaacggcaggtttcgcacgcttaatggtgagatccttcagccgggtgccacgcccgcccgcgaggatcaacgccacggatttgatgggtaattgacgcgccagcatcagcggatcgtttttttcaagcctaaccatgattaactcctttttacacccccgctttccagctcatcccgccgcgccgccgccacgggtccaaccgaaagcttcagggcttacgacctttgaaatacgcacactccgtgcgcgggcccatgccagacagccatgatgaccggattatcctctccggcgaatggaggaacggcgcgccattccccctcgggtaaaaccatatcgaccacctctgcggtggcgttcagcgtgagcagccagcgatccgacaactggatctgcatacacgcggccccctgctgccactccgcggcagtcaggggctgggcgttgcgattaagccagcggacgttgccatccccctcctgccaccagcggttgcgggtgagcgccggaatacgacgccgcaggtggatcagcgccgcggtaaaggcggttaatcccgggttcgcctggcgccagtccagccacgtcagggcgttgtcctggcagtaagcattattgttaccgtgctggctgtggccctgttcatcgcccgccagcagcattggcgtcccctgagccagcagcagcgtcgtcagcagcgcatgcgcgctggcgcgccgccgttcaatcaccgcaaaattcgcttctaatccttctataccatgattgttgctgtagttattgttagtcccatcgcgattctcctccccgtttgcctcattgtgtttctgattgaaacaaacgcagtcgcgcagcgtgaagccatcgtgggccgtcaccaggttgaccgtcgccgatggcggcttgccatcgcgggcaaagagatcgctggaggccgcgaaacgttgcgcaaaatcccccagggagacattttgctgtagccagaagcgtcgggcgctatcgcgaaaatggtcattccattcagcgaacagcggtgggaaattacccacctgatagccgcccgggccgatatcccaaggttccgcaatcagtttcacctgcgacagcacgctgtcgcggcggatagcctcgaacagcggcgcatcctggcggaattccggcgtccgccccatcactgaggcgaggtcgaagcgaaagccgtcgacatggcactcatccacccaaaagcgcaaacactggcgcgcccactccaccacgccggggtggctaagattgagcgtattaccgcacccggtccagttgtgataatcgccatcctcccttacccaataatagctacggttgtcgattccgcgcagggagacggtgggcccttcgagatcgatttccgcactatggttgagcacgatatccagaatcacttcgataccggcggcgtgcagcgccttaaccgcatcgcgaaactcatccagggcgcgatccgggtcgctggcgtagcgcggatccagcgcgaaccacgccaacgggttgtagccccagtagttgcttaaccccatccgctgcagtcgcggctcgctggcgaactgcgccaccggcaacagctcaagggcgctgatgcccagcgatttgaagtaagcgatcatcgccgggtggcccagcgctttataggttccgcgaatggcttccggtagctgcggattaagcaaggtgagccctttcacgtgcgcttcataaatcaccgtttccccccatggggtacgcggcggtttatcgccacgccagtcatagcgcagatccaccacctgcgattttggcgcgaccgcggcgctgtcgcggcgatcgggctgccacatgccgccgtgcaggcgctcatcgtcaggcagatcgccctcgacccggtgggcgctgggatcgatcaacagcttggccgggttaaagcggtgcccctgcgccgggtcccagggaccatgtatccgatagccgtagcgcaggcccggcccggcggcggccagccagccgtgccagatgtcgccgctgcgcgccgggagatcgaagcgttgctcgttgccctgctcgtcgaatacgcacagctccacccgctccgcatgggcggagaagagggcgaaattcacccccttgccgtcatagctggcgcccaatggcgcaggtttgcctgccgcgagtgaggtcattgcgcctcccggaccagccagatcgtcgccagcgggggcagggtcagcgacagcgaatgttcgcggccatggctggcgatagcgtcgctttccaccacgccgccattgccctgattgctgccgtgatagtgcatggagtcggtatttagcgcctcgcgccagcggcccggctggttaatgccgaagcggtagtcgtggcgcggcaccggcgtgaagttgctggcgacgataatctcgttgcccgcccggtcacggcgtacaaagacaaacaccgagcgctcatggtcgtcgaccaccagccattcgaagccgtaggggtcaaaatccagctcgtgcagcgctttatgatgacggtaggtatggttcaggtcgcgcaccagccgctggacgccgtggtgccagttgtcgccgccctccagcagatgccagtcgaggctaacgtcatggttccactcgcggccctgagcgaactcattgcccataaacagcagctttttccccgggaaggcgaacagccagccgtagtaggcgcgcaggttggcgaacttctgccaggcatcgcccggcatgcggtcgagaatcgattttttgccgtgcaccacttcatcgtgggagagcggcagcacaaaattctcggtgtagttgtagagcatgccgaaggtcattttgtcatgatggtagcggcgatgcaccggatcgagcttcatgtaatccagggtgtcgtgcatccagccgaggttccatttgaaccagaaaccgaggccgccgccggctggcggacgggtcaccccggcaaaatcggtggactcttccgccatggtgaccgcgcccggcgtctgttcgccaaggatgcggttggtgttgcgcagaaactcaatggcttccagattctcccgcccgccgtattcgttggggatccactctcccgccttgcggctgtaatcgcgatagatcatcgaggccaccgcgtcgacccgcagcgcatcgatgccgaagcgttcgatccagtacagcgcgttacccaccaggtagttgctgacttcccgacgtccgtagttgtagatcagggtattccagtcctggtgatacccctcgcgcggatcgctgtgctcatacagcgaagtgccgtcaaacgaggcaagggcaaaatcatccgccgggaagtggccgggcacccagtcaagaatgacgttcagcccggcggcgtgcgcggcattgataaagtaacggaaatcgtcgcgggtgccgaagcggcgggtcggcgcatagagcccggtgggttggtagccccagctgccgtcgaacgggtgctcgttaaccggcaatagttcgagatgggtgaagcccatccatttcgcatagggcaccagctggtcggccagctcgcggtagctcagccagaaattattatcggtatgacggcgccaggagccgagatgcacttcatagatagagatcggggcatcaaactggttcgccgctctgcggtccgctggctgttccactttgggcggcaggtcgcagataagcgaggcgctttccggacgcatttgcgactcaaaggcgtaagggtcggctttgacccgcagattgccgtgggcgtcaatcagttcgaatttatacagctggccattatgcgcgccgggaacgaacagctcccagatcccggactctttgcggaatcgcatcgggtggcgacggccatcccagtagttaaactgccccaccaccgatacgcggcgggcgttcggcgcccacaccgagaaacgggtaccggtgacgccgtccatggtggcagcgtgcgcgcccagcgtttcataagggcgcaggtgggtcccttccgacagcagccagacgtcaaggtcctgtaacagcggaccaaagcgataagggtcatcgatcagattctgctgcccgtgccaggtgacggccagctgatagcgaaaagcgtttttacgccgcggcaggacgccgctgaagaaaccacgcgagtcgagacattcgagcttgccgactttgcgtccggttttcggttcaataacccacacgtcggtggcatcgggtaataatgcgcgcacttccagcccggcgtcagtacggtgcatgccgagcacggaaaagggatccgcgaaatgaccggcgattagcgcattaatcacgtctctatcaatatgattagacatgctttcatcctgttgtaagtgtcgctcattcctgtaactggcgactttttttgacctgaacggcgcagtgctctcagcatcctcctgctccgtcccaccttcaggtaaggaattccttacttaaagcatagccaaggctgagttacctccgtggggaaaaatctaacatccgcgtttactccttgtattacgcaaaaaaaaagggggcttgaagaccccctttctgttcatcctgggcttacgccagctggcgaagcatccggcgcagcggctccgcggcgccccacagcagctggtcgccaacggtaaaggccgatagatactccggccccatattcagtttacgcaggcgtcctaccggggtggtcagggtgcccgtcaccgcggctggggtcagctcgcgcatggtaatctcacgatcgttcggtaccactttggcccacgggttgtgcgcggccagcagctcctcaacggtcgggatagaaacatctttcttcagcttgatggtaaacgcctggctgtggcagcgcagcgcgccaacgcgaacgcagaggccgtctaccgggataacggacgaggtggcgaggatcttgttggtctccgcctggcctttccactcttcgcggctctgaccgttatccagctgtttgtcgatccacgggatcaggctgcccgccagcggtacgccaaagttatcgaccggcagctcgccgctgcgggtcagcgacgtcactttgcgctcaatatccaggatggcggaagccgggtccgccagctccgcggccacatgattatgcagctgccccatctggctcagcagctcgcgcatatgacgcgcgccgccgccggaagccgcctggtacgtcgccacgctgacccactccaccagatcctgagcaaacaggccgccgagggacatcagcatcaggctgacggtgcagttgccgccgacaaaggttttcacgccgttgttcaggccggcggtgatcacgtcctggttaaccgggtcgaggataatgatcgcatcgtccttcatgcgcagcgaagaagccgcgtcaatccagtaaccctgccagccgcttgcgcgcagcttcgggtaaatctcgttggtgtaatcgccgccctggcacgtgacaataatgtccagcgccttcagcgcgtccagatcgaacgcatcctgcagcgtgccaccggtgctaccgccgaatgacggcgctggctgtcccagctgggaggtagagaagaacaccgggcgaatggcgtcgaaatcgcgctcttcaaccatgcgttgcatgagaacagagccgaccattccgcgccagccgataaaaccaacatttttcataacgtattcctgcgaggtgtgtgctgtttgtgcctggccagtttccaactggattatccctcaccttacaaaatgcagctaaagtcgcaagtgaaattaatcaatgattgctgaacaatcagaaaagcaacttatcctgcacattgtccaccgtcgctggtcgtcgtcaaaagcgcaacgattatcggggaaatcccccggggaatggaatattttccgtcgctattttattgatcctgattatggattaagcgtgaaatctggtgcttttccgcttgccaaaaaaaagcgacaaacccagtcacagcaagggatgacgagggatacgagcatcgtcgtagcgctaataagggccaatagctggcaaggaaaagagggaaaaagggcggtttattgcaaagaagccagggtaagcagcgttaccctggctttttatttcccgcgagcgggagatgagcgggcttagctcagcagctggaaggcgatcataccgacaatcgccccggtggtgccaaggatggtttccatcatggtccaggtcttcagcgtctgggcttcactggcgccggtaaatttaccgaacagccagaagccggcgtcgttcacgtggcttaccacaatcgagccgccggcgatacagatagacaatgccgccatctgcgcgccgctgtagttcagctgctcaatcaccggcatcaccaggccgaccgccgtcaggcacgccacggtggcagagccctgaatgatacgcaccgccgccgccagtacgaagcaggtaatagcgatcggcagccccattccggtcagcgcttcaccaagcgccgggccaacgccggagtcaaccagcacctgcttgaagacgccgccagccccgatcaccagcagaataatcccggccggctgcagcgcgtggccgcaaatctccatcacccggtctttcgccattccctgacgtaccgccagaccgtaaatcgccaccaggcaggccaccaggatcgcggtgaacgggtggccgataaactcgaaccattcgtaggcagtggaacccaccggcacaaagcgcgcggcgatggttttcaggccaaccagcaccagcggcagcaggatcagcgccaggctgaagccgaaggagggcattttgccttcgccgagatgcggttccgtgacgtcgtcaggaatatgcaattcgacgtagcggctgatgaagttgccccatagtggaccggcgataatcatccccggaatggccgcgcacaggccaatcaggatcatccagccaaagtcggcgtgcatttgcgacgccagcagcatcggcgccggtccaggcaacagaaacgccgcggcggcggcaacgccggcaaacagcgggatcaccagcttcacgaggttagtaccggtatggcgcgccatcgagaaggcgacgctaatcagcagtacgatcgccacttcgaagaacagcggcagcgcgcagatgagaccggcgagaccaatcgcatagtgcgcgcgattgtggccaaaggatttgagcatcttgacggcaatctgatcgaccgcccccgtttcatgcaggatcttaccgaacatcgcgccgagcgcgacgacgatcgccaggaagcccagcgtaccgcccatccctttctccatcgtcgccgcgattttatccagcggcatgccggagaagagaccggcgccaatagaaaccaccatcaaagccacgaaggcgtgcattcgcgccttcatgactaaaaacagcagcagcaataccgagccgactgctgttaaaacaagcgttaaagtactcactagtgactgcctttgttgatcacctcgatggtgctggccaccacgccttccagcggctggtcgatatcgacgataagcacatcgctctcgtcggcgcctggttcctgcagcgtttcaaactgcgtcaccaacatttgggttttaaagaagtgccctttacgcgccttcagacggctttcgatcacgtcgaaatcgcctttcaggtagatgaaggagaggttcggattgcccttgcgcagaatgtcgcgatagctcttcttcagcgccgagcagacgatcagcgacaccttgttggtacgctgcatggcgaacgcggcgtcatttagcgcctgcagccacggcgtgcggtcgtcatcgttgagcggctcgccggaggccatcttggtgatattgctgcgcggatggagaaagtcgccgtcaagaaacgcggcatgcagttgatgcgccacttcgctggcgacagcggattttccgctgccggaaacgcccatcaggacatagacgtggtgatcatggttagtcgtgctcaaagcgtcctcccactggactggtacgccgcgccggggctgactcatccagcgcgaaggcggcgtatcggttaattgttacgggtaactgttatcggtaacattgtcatgccggacctgtggagaagcaatatccattcgtgccagatgtgaatatgtgtgatctacttcaaacttgtcagtttaaattgatccgcccggtgacaatgtgaaacctaaatctaacatcttaggggtaatcgcttcaccacgaatgcgcgccagcagccgttcggcgccgatgcgccccattcgctcgcgcggggtcaggacgctggccagccgcggctccatcacctggccgatatcatggccgtggaacccggcgatcgccatatcatcggggatcttcagccccagacgctggcactcgaacgccgcgccgaccgcgaggtcatcgttggtgcagaaaatgccgtcgagctgtggatattcgcggcgcgcctggcgcatcagctcaatccccgaagaataggacgaggattgctccaccatcacgctgtagggcgtcatcccggcgtcaagcatcgcctgctcgtaccccttctgtttgatgatagtacgttcatcaagacgcgcccccagataggcgacatggcggtggccgcgggcgatgatcgccgcggtcatctgccgggcggcttcaaagttatcaaacccgacggcaatatcgagacacggcgaccggctgtccatcagctccaccaccggaatgccagcgacttcgatcatcttcagggtgcgcggcgtatgggtgcgttcggtgaggatcaggccgtcaatgttccaggagagcatcgattcgaggcgtttctcttccatttccggcttatagccgtagtgcgccagcatggtttgatagccgaaggcgtcggtgacgctttcgataccgcgcagcacttccgagaagacctggttggttaacgacggcagcagcacgccgatggcgcggctggtggcgttggaaagaatgtcaggggcgcgattgggaatataacccagttcatcgagggcaacggcaatcttgccacgcagcgcttcggagacctgctccgggttgcgtaaatagcgactgaccgtcattttggtcacgccgacaagatcggctacatcctgaagtacgggtcttttctttttcatcgtcctgactgtgatcaacgggaaacattttctcagtttatcacggacaaagcgcaaccttccctaacatgagggaaggctgcgcaatttatttaacctggctcagataactatcaaaccggcggcagatcgaacagcaggatctcgctatcgctgtcggcatgaaccgaaatcgcctgctcgtcccagatggccaaaccgtcgctggtggtggctttagtaccgttgatggtcacttcgcctttgaccacctggatccacacgcggcgttccgcggcaatctggtgaaccgactgctcatctttcagcagcgcccagcgatagagttccatatcctggtacaccttcagcgagccatctcgcgcatctggcgacagtaccagctgtttgccctgggcggcgtcgaagcggcgctgctcgtagcgcggggtaatgccggtttcttccggaataatccagatctgatacagacgcagacgatcggttttgctcgggttgtactcagagtggcgcaccccggtacccgcgctcatgatctggaactcgcccgccggcacctgctctttgttgcccatgctgtcctggtgctccaccgccccttccagcacataggtcaggatctccatgtctttgtgcgggtgggtaccgaagccctgaccggcgtcgatgacgtcgtcgttaatcacccgcagggcggagaagcccataaagttcgggtcataatagttggcgaaagagaaagtatgccaggaatccagccagccatggttagcgtggccacgttcgttcgctttgcgtaaatagatcatgttgcacccccgtatgttgtcgatggagtcagtgtggacccatttcgccggcgatcatagagggtgaaaattgactcctctgttcaaaaaatatgaacaagcgcagaggagccaatttgacttatcgggtaagggtaatggtggccggtgaaggctgctcaaagccgcgctgcaggatctccatattggtgagaacgtcagtttccttgacgtaattcggctggccgttgacgagggtgtcgtacagcgcgtcgtacacccgaccataatcgccgctctccagcggcaccgcttcgcgcaccatctcccctgcctcgttgacatacaccagctcgccaacgctgtcgtccgcgccaaatcccggctcgcccggcatgatattggccttcaggctggtctcctgctggtcaatgccgtacttcacaaacgaacctttgtgcccgtgaacgataaatttcgggtaatcgatctgcaccagatggctggtcttaacgatggccttcatatcgccgtagaacagctgggcttcaaaggtgtcatccgggttggctttattgcgcagcgagcgcagatcgtaagagacatggtccgggcggccgaacagcgaaatgatctgatccagggtatgcacgccaaggccatagaactcgccgttttgcggaccgccggggttggtctccgccagtgggcggtagttatcaaaatgactttcgatctccaccagttcgccgagtttcccgctctcaatcacctttttggtggtcaggaagcaggagtcgaaacggcggttctgatagggcgtcaccgtcagacctttgctgttcgccagggcaaacagagtttttgcttcctccagcgtcggggtgaacggcttttccaccagcacgtttttccccgcctccagcgcctttttcgcatattcaaaatggctgtcggcgtgagtgcagaccaccaccagcttgaccagtggatcgtttaatacttcatcaaggtcgctggtgaaatgaatatgggaatactgcggcgcctgctcctcgggcttcgcccggcggcggtaaatgtgcgctacctgccagcggtctttgcggtgcaaaacgtaaggaaggtgatagcgggtggtgcttttaccaaagccaataaatgcgcagtgcagagtcataacgctgtccttagttaatgagctaccttcaaccatagcgcaagccggtccctcacttcatcctctctgttcgcttgcagtgaagattcgttaggaaaatagttcgagtatcactcatacgtaattattaataacttattgattaataagtgattaaatcagcagttttcggcaaaaaaccttgatcgccatggcaaaactgcggataagtggagagcaaaccaggaggttgctgatgactaacggagtagccagccgctgctgatggacaaacagtatctcgccataaacggcgccctttttttctggcttctcgcgctgatcgcctggtctgtcgatgcaagcgcgctggcgcgcctggcggccgcctgcgcgcttatcgctttcctcctccatagccaacggaacaagattaacgcgatgtttattaagaaaaataaaacggaacctcagatatcagaagcagccacgcctccggcaattaacccagaacccgaagcggtcgccagcaaaaaacacgagactacggtcatcgccagcggggtgcatttcgtcggcaatatagtcgccagcggccatgtctatatccacggtcaggtcaccggcaacattgaggccaaagagcatttgattaaggtaatgcgtgaaggccaggtggagggcaacgtcagctgccgggagctaataattgacggcaaggtgcagggccagtgtcatggcgacagcatcaccatcgaggagcacggccatctggagggtaccctcgcctatcgcgcgctggcgatcaagaaaggcggcgtttttagcggtcgcgctgaactgctggccgccgcggagaacaaaagtcatattctcggtctggtagtagacgcaccctccaaaaccgacgcggagcccgtcaggccgcagagcgcctgagatagcagcaaaaaaaaagccagcacccggctggctaaagtaatactggaagcaatgtgagcaatgtcgtgctttcaggctttccgcaagggtctccctgaatgcaggacaataataatcattctcattcgcacttgtctacttttttttgcaaataatgcgtgttgactcgaacgccgtagtcagtgatgtttaaagggacttttcacctgaatgaggaacaaggaatgagtgacatcgtgatacgccatgctgaaccgaaagatattgacgcgattcgtcaaattcacgcccagccggaggtgtatcacaacacgctacaggtccctcatccatccgaacatatgtggcgggagcggctaaccgatacgcccggcgtgaagcaactggtggcctgtatcgatgagcaagtcgtcggccatttaagcattgccgtcgtccaacgtccccgccgtagccacgtcgccgattttggtgtcagcgtggattcgcgctggcacaaccgcggcgtcgccagcgcgctgatgcgtaccatgattgatatgtgcgacaactggctgcgcgtcgagcgtattgagctgacggtgttcgccgataatgccccggcgattgcggtgtataagaagtacggctttgagatcgaaggcaccggcaggcgttacgcgctgcgcaacggtgagtatgtggatgcgtattatatggcgagaatgaagtagcgtgttgccgggtggcggcttcgccttacccggcctgcgttcgtgcagttgtaggcccggtaagcgcagcagcgccaccgggcaacacatcaataccccgccgttaaatcatccggcgaacgcggatcggaggcgccatacagcatgccgtccggtcccaccatgatgctctgggtactgcccatcgcctctttcagcgccactttctgccccttcgcctccagcagcttgagggtatccgggctaaagcctttctccacccgcagctcatccggcagccattgatggtggaaacgcggcgcgttggtggcttccgcgacgttcatcccgaaatcgatggtattgaccaccatctgcagtacggtggtgatgatccgactgccgcccgggctgccggtcaccagccaggttttgccatctttcaccacaatggtcggcgacattgacgacagcgggcgttttttcggctccaccgcattggcgtcgccgcccaccagaccatagacgttaggcacgccgggcttcgccgagaaatcatccatctggttattgagcagaatgccggaattaccggccacaatgccggtaccgaaggtcgtattcagtgtataggtcaccgccaccgcattgccgtctttatcgaccaccgagaagtgggtggtctggttgctttcatagggcgccagcttgcccggacggatctggctggaaggcttcgccttgttgacatcaatctcggcggcgatcgctttggcgtaagccttgctggtcagcgcctgccacggcacgttgacgaagtcagggtcgccgagatattcagagcggtcggcgtaggcgtgtttctctgcctccgccatcacctgcatggcgtcggcgctgccaaaaccatatttctgcatatcgaagttttcgaggatattgaggatctgcacgatatggatcccgccggaggacggcggcggcatagagtaaacctcatacccgcgatactcgccgctaaccggcgtacgctccacggccttatagccggcgagatcggctttggtgattagcccgccgtgctttttcatctcgtcagcgatctggtcggcgatggcccctttatagaaggcgtccgggccgtgctcggcaatcagctccaggctcttaccgaggttcttctgcaccagccgatcgcccttcttcagcggctcgccgttcttccagaagatcgctttactattttcatgctgcgggatcacttcgctgccgtaggtcttcagatcgtccgccagcgcatcgttaacgataaacccctcttccgccagcttaatcgccggacggatcactttgttcaacggcatggtgccatacttttccagcgcgagggagaaaccggcgacgctgcctggcgtgccggaggccagatgcgaagtcagtgattttttactgtccgggttgccctggtcgtcaaggaacatgtcgcgggtggcctgctctggcgccatttcgcggaaatcgatcgccgtggtcttgccgtctttagtccgcagcatcataaaaccgccgccgccaatattcccggcctgcggatgggtgaccgccagcgcgtagcctaccgctaccgccgcatcgacagcgttaccgccctggcgcaggatatccacgccgacgcgggtcgccagcgcgtccaccgaggccaccatcccctgccgggcgcgtaccgggtggaacacatcttcctctacgccataagagaccggcggcggtggcggattggcggcgacggtaaagctgccccccgccagcaacgcagcgatgaccacctgacgccatattgttgtttttatcattgtcttactcctgaaaggtaggtttcattccccgcttaagcctggttgataactcctaaaaaatcattgttatggcagattcgaggtacacttaagtgatcccacgcacgggaggagaaaaccatgaaagcgattctgtttctggcggcgctgatgccgcttggcgtattagcccagccgatcaatattaataacaaccctaaccagccgggttacgtggtccccagccagcagcgcatgcaaaatgagatgaaggtgcagcaacagcagcagcagagcatgctgaagcaggatctgaacaatcagacccgctcgcagcagcagcatttgcaaaaccagctgcagactaatcagcagcgcgcggcccagggcggcaatctgaatgcgccgcagcaggtgcggccaaataacaacggtggaatgctgcggcagactaatccgtaaaggtcgtccgccgcaaatccgtcttaaggctggaaattcggcccgataacatcaatggcatcggtgcagatgcagtctacgccccagcacagcagttcggcggcgcgctggggtttattgaccgtgtacaccagaatgtgcaggccggcctgtttcaggctcgccacccgcgccgcatccagcagtttgtgattgaggtgaatcgacacgcagcccaaccgggtggtcaattcgcgccagtcatcgcgccactcatccagcagcagcccgcgcggcagctcgggcgcggcttcttgcgccgcctccagggcgtcgatttcaaaagaggagagcagcggcgcggtcatgccttgccatagatcgcgcgcggccagcgccaccactttcccggtctgcggccccagcccggtggtcggcttaatttcgatattcgccatcatgccgtggcgacggcagcgctccgccacctgggagagcaacggcagcggctcgcccttaaattcacggctgaaccagctaccggcatcgaccttcagcagatcgtcccacgccagctctcccgccacgccccagccattgctggtgcgttcgagattatcgtcatgcagcagaaagatctgcccgtccttcgacagcttggcgtcaaattcaatcatcgtgtgcccgtagcgggcgccgacgtcgatagccgccagggtgttctccggcgccagtttaccgccgccgcgatgggcgacgatgcggggataaggccagttactcatgcgcgttgtcctgtttcaccatcaaagaggtgcagatgttccaaaggcagatgcagccatagcgtgctgcctgccgccgggcgctgctggtgcggcagtctgaccaccagcttctgttcgccccagcgcccgtgagcgaggttatcggcacctaaaatttccagggtgtccatcagcagcggaataccaccttgcgcctgcgagcttaagataaaatgctccggacggataccgagcgtcattttacgcccagcgtggcgccggtgctcatgattcgtcggcagctgcatgccgcccgccagctcaaagcgaccgccgtcatcgctgatgcgcccttccagcaggttcatggccgggctgccgataaagctcgccacaaagcggctggctggcttctcgtacacttccaccggggtgccgatctgctcggcaacgcctttgttcatcaccatcacccgctgggcgagggtcatcgcctccacctggtcatgggtgacgtacagcgaggtggttttcaggcggcgatgcagctgctgcagttccagacgcatctgcacgcgcagcttggcgtcgaggtttgacaacggttcgtcgaagaggaataccgccgggtcacgcacgatggcgcggcccatcgccacgcgctggcgctggccgccggacagttcccgcgggcggcgcttgagcagaccatccagctcaagaatgcgcgccgcctcctgcacccgctcggcgatcaatcccttacccatgccgcgaatcttcagcccccacgccatgttctcttccacgctcatatgcggataaagggcatagttctggaacaccatcgcgatgccgcgatccttcggctccatctcggtcacccgtttacgatcgatccagatatcgccgctggtcacccgttcaagtcccgcgaccatccgcagcagcgttgatttcccgcagcccgacgggccgaccatgacgataaattccccgtccgccacgtccagcgtcaacggttgaattacctgggttttgccatcccagcttttgcttactgcctgtagttttaaaccagccattttatttctcactatcgaccaggccgcgcacaaacgcgcgctgcatggctaaaacgatgacgaccggcgggatcagggtcagcagcatcgccgccatcacctgattccactgggtagtaccttcgccggtggcgatcatgcctttaataccggcgacggcagtgccaagattcacatcctgaataatcagcaacggccacagatactggttccagccgtagataaaggtgatgacgaacagcgcggcgaggttggttttcgacagcggcagcacgatgtcgcgaaagaagcgcatcggcgaagcgccatcgatacgcgccgcttcaatcagctcgtccggcagggtcataaagaactggcggaacaggaaggtggcggtggccgaagccatcaacggcagcgttaacccggcatagctgtcgagcatgttgaggttggcgatcacctccaccgtcgggaaaatacgcacctcgaccggcagcatcagggtgataaagatcatccagaagaacaggttacgcagcggaaagcggaaccagacgatggcgaacgccgaaagcatcgacaccacgattttgccgaccgtaatggcgaacgccatgatgaaactgttgagcatcatcagccagaacggcgcgctgttgacgccgacgccgttcacccagatggtcttcatgttctccagcagatggccaccggggatcagcgtcatcggcgtttcaaataccgatttgttatccagcgtcgccgccacgaaggcgacgtacagcgggaataaaatgacggcgatacccaggatcagcatggtgtggctgaaaatcgtcagcccgcgacggttctcaatcattggtaacgcaccttactttcaacgtaacggaactgcaccaccgtcaggataatgacgaggaacatcagcaccaccgactgcgcggcggaagcggatagatcgagcccggcgaaaccttcgcgatagattttgtagatcagagtggtggtcgcctgcaccgggccgccagcggtggcggcatcgatcaccgggaaggtgtcgaagaaggcataaaccaggttgaccaccagcaggaagaaactcaccggcgcaatcagcggcagcgccagcttaaagaagcgacgaatcggcccggcgccgtcgatggcggcggcctcaaccagcgaacgcggaatcgactgcagcgcggcgaagaagaacaggaagttgtagcttatctgcttccacaccgaggcgaagaccaccagaaacatcgcctggccgctgttctgcgcatggttccagtcatagcccagctcgccgaggaaatgggtgatcagcccgcgcccggggttaaagaggaagatccacagcaccgccgcgacggcgggggccacggcgtacggcagcagcatcagcgtttgataaaagcggctgccgcgcaccacatagtcgaccagcgcggcgaaaaacagcgaaatgagcaggccgctgacggtcaccagggcgctgaattttatggtggtccagaacgagtccaggtagtacggatcgtggaacagcgcaacgaagttatccaggccgacgaactggctggaaaggccaaagggatcgacgctctgcagcgagtaccacagcgcttcgcctgcgggccagataaagaaaagcagcgtgataatcagctgcggcgcgaccagcacatagggcagccagcgcgagcggaataccggacgggatgatgacattgagattgggttcctgaacaatgccgggtggcggctacgccttacccggcctacatagggcacatcgtaggcccggtaagcgcagcgccaccgggcaagttacagattacgatttggtcgcttgctcgaagcgacgcagcagctggttcccgcgctgcacggcggaatccagcgcctgctgcggggttttcttgccggtccacacgctctccagctcttcatcgacgatggtgcggatttgcggcatgttgcccaggcgcagacctttggtgaacggcaacggcggcttgttcagcatctggcgggtagcgatatcggcgcccgggttcttatcatagaagccctgctgacgcgtcagatcgtaggccgcggtagtgatcggcaggtagccggttttctggtgccactcggcggcgttttccggtttggtcaggaagtcgaggaacttcgccacgccggtgtaggtctctttgtctttgccctgcatcacccacaggctggccccgccgatgatggcgttctgcggcgcgcctttcacgtcggcatcgtaaggcatcatgccgacgccgtagttaaatttggcgtacgggcggatatcggccagcgatccggacgaggcagtggtaatggcgcagtcgccgttatagaacttttcggtagactcgtctttacgcccgaagtagctgaaatcgcccttcttgttcatctcttcgagcagcgcgatatgcttcacctgctccggcttgttgaactcaagaaccgcgtcggtaccgtcgaagccgttattcttcgtggccaccggcagaccgtgccaggcgctgaagttttcaatctggatccagccctgccagccgctggcgtagccgcacttcatcccggcggctttcagcttcgcggtgtaggccgccagatcctgccaggtcttcggcggctgctccggatctaagccggcttttttgaaggcgtctttgttgtagtagagcaccggggtagagctgttaaacggctgggagagcagatggccggttttcgaatcggtgtaatacccggccaccgtcggtacgaactgcgattcatcaaacttgatgcccgcctcgctaaacacctggtagaccggcttaatggcttttgacgccatcatggtggcggtgccgacttcatacacctgcaggatagccggcgcgttgccggtacggaaggcggcgataccggcgctcaggctctgctcgtagttgcctttgtataccggaacgattttgtaatcaggattggccgcgttaaagcgttgcgccagagaatccacttctttacccagctcgccttccattgagtgccagaacgggatggtggtaaccgccagggcctgaccggcaaaagccaggctcagcgccagtcctaaagctgtatgtcgtaacgatatcatcggttatctctcttgttgtgccggatgcgcgatttcacgcgttttatgctcgcggggtaacatgacatgttcgaattacagaaaaataacttttttattacaaaaaaaagatagtaacgggtcagagagatgacaagccgatgaaaggacgggggaagtaaagtgggagctgagacacggataatattcgtgcggtcggctcccggggtcggcgcaagcgcctcgcccgggctacaaaccggcgaagccgccgggttgcaacgagttaaccgtcatccgcgcaagcgcgcgacaatctgttccagggtaagttgccctgctgccgcctcgacggtcatgccgacgaagtctggattcgccggcaatataattccatttcgctttaaaaaaagcagagtgataaacagtgccgtacgcttattaccatcattaaatatatgaccgcgagaaatcgccagcagatgcatcgcagcgagtcgccacacgtctgtcacaccttcatattcaattttgtttagcaccctatacattatcgcttcggcacgccccggatcgggcataccggcaacgccaggcgtgacgcggagcagcctgtcgtgaaactgtattatctcttccgctgagataatctgcagcgtcatttatccgcaagctccctgatctcatcaccatgaaccgccatgatagccgcgaactcatcatccattctggccgtctggtagcgttcaaactcttctgcactaatgatgactgcagatttatgcccacgacgggtaatggtcacaggtacacctgtcactgcgctttccagcacatcggccagattttgccgggcttcgctatagttaaccgttctcataaaaacctccaaagctgtactcttttattgtacaacatacatgtacaaaaaaagagccaacaggctcttttaaatgtattcgtgcgatcggctcccggggtcggcgcaagcgcctcgcccgggctacaaaccggcgaagtgaacgacgccgggttgcgatgaattaaccgccgagataggcgctgcgcaccgcctcgttggccaacagcgcgtcgccggtgtcctccagcaccacgtggccgttctccagcacatagccgcggtcggccagcttcagcgcctggttggcgttctgctcaaccaggaagatcgtcattccctgctcgcgcagctgctcgatggtgtcgaaaatctgctgaatgataatcggcgccagccccagcgacggttcatccagcagcagcaggcgcggttggctcatcagggcgcgaccgatcgccagcatctgctgctcgccgccggacatggtgccggcgcgctgaatacggcgttcatgcagacgcgggaacagctcatacacccatttgatgcgggtctggaactgatcgcggtcggcaaaaaaaccgcccatcgccaggttctcttccaccgtcatacgcgaaaagacgcgccgcccttccggaacgatcgccaccgcctcgcgcatgatcttcgcggtttgccagtcggtaatatccttaccgtcaaagacaatgcgcccgctggaggcgcgcgggtcgccgcacagcgtgccgagcagggtggttttccccgcgccgttggcgccgataagcgtgacgatctcgccctgtttgatatgcaggctgacgttgtgcagcgcctgaatcttgccgtagtgggcgctgacgttgtcaaaagttaacatcgcgttttccatcttatgcctcaccaaggtatgcgcggatcacatccgggttattacgaatctcttccggcgtcccgttggccagcggtgttccctggttcacgacgtagatgcgatcggaaatgcccatcaccagcttcatatcgtgttcgataagcaggatggtggtgttgtgatggttacgcagctcggcgataagctcgtccagctctttggtctctttcgggttcagccccgccgccggttcatcgagcatcagaatttccggctgggtcaccatgcagcgggcaatctccagccgacgctggtcgccgtaggccaggttgctggcctgacggttggcatgctccagcaggccgatgcgctccagccaggtggcggccctgtccagcgcttcgctctgcgcccgacggaaggccggcgttttcagcaggccggagaagagcccggttttcagctgctgatgctgcgccaccagcaggttttcaatcaccgtcatttcgcggaacaggcgcacgtgctggaaggtccgcaccacgcccatccgcgcaatctgctgacccggcagcccttccaggtgctggtcgcgcagcagaatagtgccgccggtgggcttgtaaaaaccggtcaggcagttaaagacggtggtcttcccggcgccgttggggccgatcagcgagacgatctcgcgctctctgagctccagcgacacattgttgacggccagcagaccgccgaaacgcatcatcaggccgctaacggataataatggctgactcatgcctgctctcctttcgcctgaccgtttttcagcttcaactgcacgcgcgtcattggcagaagcccctgcggacgccagatcatcatcagcaccatcaggccgccgagcattaacatgctgtattcgttgaagtcacgcatcaactcgcgcgagaccaccagcagaatagccgcgaggatcaccgcgaactgcgagcccatcccgcccagcacgacgatcgccagcacaaaggctgactcggcgaaggtaaaggattccgggctgacgaagccctggcgcgcggcgaacagcgtgccggcgaagccagcaaacgcggcgctgatggtaaaggcagtcagcttgatgcgcgtcgggctcaggcccagcgaacgacaggcgatctcatcttcacgcagcgcttcccacgcccggcccagcggcattcgcagcaggcggttgatgacgaacaggctgagcactaccagcagcaacgccaccaggtagaggaaaatcacccggtcggagggatcgtatttgacgccgaagaagttgctgaaggtatcccagccgccttcgcgggcgctgcggctaaattcgaggccaaagaaggtcggtttcgggatctggctgataccgttcggcccgccggtgatctcggtattgttgagcagcagaatgcgcacgatctcgccgaagcctaaggtcacaatcgccagatagtcgccgcgcaaacgcaacaccgggaagcccagcaggaaaccggccgccgcggagaccaggccggccagcgggagacaggtccagaagccaagaccgtaatagtggttcagcagcgcaaaggtatacgcgccgatggcatagaacccaccgtagcccagcaccagcaggccggaaaggccgaccaccacgttcaacccgaggccgaggatgatatagatcatcgtcagggtggcgatatccaccgtgccgcgcgacaccataaacggccaggccacggcaatcaccagcagggcgatcaggaacagcttctgcttcaccgtcgacccgtcaatcgccggcataataaacttcggcccggagacgttcttaaccgctttctggaacagcggccgcagcagctggaagaaaaagaccaccgcggtaccgatgaagatccactgccagcgaatatcggcggcggtatcgaccaccagtttggtgccgttcagctccagctgcacgcccataaagacgcccgccagaatgaagaacatcacggcagagagcagcgccattgcaatttgcatcggtttcatactttttccacctccgggcggcccagaatgccggtcggcatcactaacagcaccagaatcagcagcgcgaaggaaacgacgtccttatattcggtgctgagataggcggaagagagcgcctcggcaatacccaggatcaggccgccgatcatcgcgccagggatactgccgatcccgccgagcacggcggcggtgaacgccttcatcccggccataaagccgatgtaggggttaatcacgccgtagaactgccccagcagcacgccggccaccgccgccatcgctgcgccgatgacaaaggtcagggcaatgacgcggtcggtgttaatcccgagcaggctggccattttcagatcttccgcgcaggcgcggcaggcgcgccccatccgcgagtagcgaataaacagcgtcagggccagcatggcgataaaggtcaccacccagatcaccagttgcatggtggtgatcgtcgcggagaagctgtcgctgtggccgacgacccactggccgttaaacaagctcggcagcgccacgtcgcgggagccctgggtcaggctgacgtagttctgcaggaagatagacatcccgatggcggagatcagcgcaatcaggcgcttggagttacgcaccggccgataggccacgcgctcaatgctccagccgtaggtgctggcaatcacaatggcgcccacgaatccggcggcgaccagcagccagctagtgtcaatgcccatcatcatcagcgcggcgatgatcatgaaggagacatagctgccaatcatatagacctcgccgtgggcgaagttgatcatgccgataatgccgtacaccatcgtatagccgatggcgatcaacgcataggtactgcccagcgtgacgccgttaaacatctgctgcagaaaatagagaaactgctcggacataaggtaacctttttcaaaccgcccgcggttcgcaggcggagggataactcgtcttcagcgcttatttcgccgcgctcgaagagccgtcggcgtgccactggaagacaccaaactcaaatcccttcagatcgcctttttcatcccaggtcagcggcccaatcacggttttcgccccgtgcgctttcaaatctttgattaaatccagcggctgctggctgccggttctgtccatcgcctgcgccagcgactgaacggcggcataggtgatccagacgtacggtccgctcggatctttcttctccgctttcagcgcgttgacgatggcgctgttggcagggtcctgatcgtagcgttttggcattgtcaccagcatgccttccgccgcggcgcccgcgatattggacagcgaggcgttgccgaccccttccggccccataaacacggttttcaacccgacggagcgcgcctggcgcagcatctggcccatttccgggtagtagccgccgtagtagacgaagtcgatgttctctttcttcaggcgcgccagcagggcggagaaatctttttcccccgcggtgatgccatcgaagaagacgatgttggccccggctttcttcaggttgtcctgcaccgaacgcgccagcccttcgccgtactgctgcttgtcatgaatgatggcgatacgctgcggtttcactttctcgacgatatatttcgccgcggtcggcccctgcgaggagtcgaggccggcggtacgcatgatgtactggtatccgcgctgggtcagctccggattggtcgccccgggggagatcatcaggatgccttcatcctcatagatgtcggaagccggctgagtggaagaggagcacaggtggccgataacgtactgaataccgtcgttgacgattttgttggccaccgcgaccgcttgcttcggatcgcaggcgtcgtcatattcgacggccaccagcttgtcgcccttaatgccgccgctggcgttgatgtctttaatcgcctgacgcgcgccattgaactccatgtcgccccactgggccaccggacccgacatcgcgccgaccacggcgaccttaatatccttggccatcgccgcgtgcgacatcgctaatgcgacaatgcccgcgacgatggttttcgcgttccttttcatgctgcagaaccccgttcgtgatgtggtgtaaatgttttgtatttttatggttaaaaagcattctgtgcttttattaaacaacgccatttttaccattgagtttaatggtttagcgcagtttttcactaaaaaacagattaaaacctctatttttcagtcgattaagcaaagataatattctgtattttggtgaagataaacaaaaaaaagtccatcctgcagcataaaataacgatacataaggcggaataaaacgctgcacattaggttaaaattctgcttatttttcgatccatgacggattgcgctaccctgacaacgccaggaaaacgaatcccctgatgtacgcgcaaaaaacagcgctccgccagacagcaatattgggtacactggcgcctctgttttgcactggatttgccgcccatgaaactgaccattatccgtttacagcacttcagcgatcaggatcgcattgatttggggaaaatctggccgtcacaggatctgtcgacgctgacccttgatgaaaaccatcgtctctacgccgcccgctttaacgaacgcctgctgggcgccgtgcgcgttaccctgcgcggcgtcgaaggtgagctcagcgatctgtgcgtgcgtgaagtgacccgccgccgcggcgtcgggcaatacttagtggaagagacattgcgtgataacccggcgatcaatagctggcgcgtcgccgaccatggggtggaggaccgcggcgtgatggcggcctttatgcaggcgctcggctttagcgcccagcagaatggttgggaaaagcattaagccgtagccccaataagcggagcatgcccaaggaagaacccggcggcgcttcgcttagccgggctacctggcgactgtagccccggtaagcgcagcgcgaccggggtcagacaacgcatttgcagtgggaaaggcgccccccatttaatccagcatttcgcgttgtaaaaaggcgtcaagacccgaaatccccgggagcttacatcagtaagtgaccggggttgagggccgcagacaacgcatttgcagcgtgaaaggcgccccccatttaacccagcatttcgcgttgcaaaaaggcgtcaagacccgaaatccccgggagcttacatcagtgagtgaccgggattgagggccgcagacaacgcatcggcagcgtgaaaggcgccccccatttaacccagcatttcgcgttgcaaaaaggcgtcaagacccgacatccccgggagcttacatcagtaagtgaccggggttgagggccgcagacaacgcatttgcagcgtgaaaggcgccccccatttaacccagcatttcgcgttgcaaaaaggcgtcaagacccgaaatccccgggagcttacatcagtaagtgaccggggttgagggccgcagacaacgcatttgcagcgtgaaaggcgccggttaaattatttggcgtcggtcgccgtaccgttcgcatgccaggtaaagaccccgaactcgaagcctttcaggtcgcctttctgatcccacgacagcgggcccatcacggtgtctactgtcgcgcctttcaggtatttagcgatttccgccggatcgtcagactgattcaggcctgcctgcagcgactgcagcgccgcgtaggtggtccagacgaaggcgccgctcggatcctgtttcttcgccttgatcgcgtccacgatcggtttgttcgccggcacctggtcgtagttcttcggcttggttaccagcaggccttccgccgactcgccggcgatgttagacagggagacgttcgctacgccttccgggcccataaactgggttttcagaccggcggcgcgcgcctgacgcaggatctggcccatttccgggtgatagccgccgtagtagacgaaatcgatattctctttcttcaggcgcgccaccagggtggagaaatctttctcaccggcggtgatcccgtcgaagaagaccacgtttgccccaccttttttcaggccatcctgcaccgcacgggccaaaccttcgccgtactgctgtttgtcatgtaccactgcgatacgctgcggcttcactttgtcgagaatgtatttcgccgcggttggcccctgatcggagtccagaccggtggtgcgcaggatcagcttatagccgcgcgccgtcagttccggagcagtcgctgccggggtaatcatcagaatgccttcgtcttcatagatatcagacgccggctgagtggaagaggaacacaggtgaccaataacgtatttgatgccgtcgttgaccactttgttggctaccgctaccgcctgtttcgggtcgcaagcgtcatcatatttgacgatctgcagcttattgcccttgatgccgcccttagcgttgatatccgctaccgcctgctctgcgccggtaaactcctggtcgccgtactgggccaccgggccggacatcgccccgactaccgcgattttgatatcttccgccagcgccgcgctgctcataactaaggcaatacatcctgccagtaacgctttacccttcatattcatcctgaggctccccattattatggtttttgcatttgttgtgatgttgtttattagcgcattattttgtttataccgataggaaaagcatatgatagctaatcaaccgggggctgcccgcgcttttgcagcacactatgctaaacataccgtcattctgaggaatttgaaacgactaaattgcgggctatgtaacagataagtgacaaataaaaaaaccgcgccagcatgaaccggacgcggtgcaaaacagagcctgattaccagcctacgggtaggtagcccaccgcggatgctatcgcgtaggcggcgctgcaaagatacaacaacacaatgaagcattggataagcggatgggtcatccaggccggacaggtccagcccggggtcagatcgccacgctggcgggcgcccttgagcatcaggatcggcataatcgataaaatgacgccgctgaacaccccggcaaaatagagcgcgttgacgaaggagaccatgccgctataggccagcacgaacggcgggatcgccaccaccagcagcaccatcaggcgccgggcgggctgttcgtcattccccaggcggaactgatcgaagatattggtcaggaagctgccgcccagtccccagtaggaggtcaacatcgcgcacagcgcaaacagattggctgagaagaaggcccattcgccaagcgcccgaccccaggagatggtggccacatccgagatattgtccagaccgttaagcgagatcaccgacaacggcaccagcgccagcagggtaaaggtcagcgccatgccgaccatgatggctttaggcaatttttccggtttatcggcgaagccccgcgccatctccggcacgatatactgtgccgagaagcagaatgccacgacgttgaagaccggaaccatatacagccagttgccgtcgagcagatagccgacgcgggtggtctctttcaacagcgtggcaatcaccagcaccgagatcatcaccaccatgccgatgctgataaatttctcaccgcggccgatcgccttcagccccaggtagagtacccctgccgccggaacgaaaaacagcacgctgcccagcgccggcgagatgccaaacagggagtgcagcagcttaccgctgccggtcatatacgccgtcaatgccccgacgctattgacgcagacggagagaaacatcatcagcgcgccaaaaccgccgacatagcgcttcgataaaccgctgagctgcagatgtttacgggtgcgcagcgtggattccgcgacatagagcatagtcaccgtcgtcaggctgcccaccagcaccagccagaacagcagcggtaagaagcccgctttgctcgacgcataggcgatagagaggacgcccgcgccaatattggtaccgacaatcatcgataccccttcgacgaagctcagagattttgcagagacagccgtacgttcccggccggtgaggacgggagaaaaggtggagttttcagacataatactttccgttttactccggcggttttcaccgccggaaaaaaggtgatatcagggtgataaaccactcacgctgagcataaacagccggctgcggcgtcctgtttctgttcggcttccctgccgccgcagcccgccggggagacgttagctcttcagtacgcgcgccagaatatccagcgctttcgagaactgggcgtcggggatagtcaacggatacaggaagcggatcacgttgccgtagacgccacagctcagcagcagcaggccgttctcctgcgctttctgttgcacctggcgggtgaactccggcgacggctcgccagtttgcggatcgttaaactccactgccaccatcgacccccggccgcggacatcaacgatcgccgggcaggtagcgcgcgcctggttgagcacttcctgcagatggctacccagctgttcagcgcgctggcacagctgctcttcggcaatgacatccagcaccgcgtgcgccgcggccaccgccagcgggttaccggcataggttccgcccagcccgcctggggctggcgcatccatcgcctcggcgcgaccgacaacgcccgacagcgggaaaccgccggcgaggcttttcgccatcgtcatcagatccggtttcacctcatagtgctgcatagcgaacagcttgccggtgcgggcgaaaccggtctgcacttcatcggcgatcagcagaatgccgtgggtatcgcacaggtcgcgcagcgcctgcataaaatcggccggcgcgacgttaaagccgccttccccctggatcggctcgagaatgatggccgctacctggtccggcgcaatatccgctttgaaaatgcgctccagacttttcagcgcatccgcggtggtcacgccatgcgccgcattggggtaaacgccgtgatacaccgagcccgggaatggcccgaagccgattttgtagggcgcgaccttaccggtgagggccatggtcataaaggtacggccgtggaaaccgccgccgaaggtaatcagccccggacgaccggtgtaagcgcgggcgattttcaccgcgttctcgaccgcttccgcgccggtggtgaagaaagccgtttttgccggcccgtcaattggcgccagatcgttgatacgctccgccagcgaaacatagctttcgtacggcacaatctgataggcggtgtgggtgaacgcctgcagctggtcggcaaccgcggcgaccactttcggatggcggtgaccggtatttaacacggcgatcccggcggcgaaatcgatcacctcattgccttcgatatcccacagcgtggcgttttccgccttctcgacaaagtagttacacattacgcctacgccgcgcggcgtcgcctgctggcgacgttgattcagttctgagcttttcacctgcgaatctcctgtcgtgtatgtcacgttatcgcaacaaattagaaacgatgtcgtttatttacacaggagttggccctataatcgagtaccaattttgaatatctgagggatccaattgcgttcgctggtgggtgacctggtgctggtccgtctgcaggaagagcgggatcctcttctgcacaaacgcttatataacgcgctgcgccgcgcgatcctcgacggttcgctggcgcctcaaagccgtctgccgccgtcgcgggacctggcgggcgaacttggcgtatcaagaaacaccatattaacaacttatgaacaattgctggcggaaggatatgtggtttcccgtcggggaagcggaacattcgttgcccaaaccgcccctgagagctcattgacggctaaaggtcagcaagaaaacagcagtatcgcagcaccgacggcgcatatttcacgccgaggccagcatctgctcggccaggtcagcgccagcccgcgccagtggggagcgtttatacccggcgtgccggacgttaacgcctttccccacccgctgttcagtaagatccaggcccgcatcagccgtcggcccaaaccggagcggctcagctatagctgcaacggcggcactccggaactgcagcaggcgctggtggattatctgcgcgtgtcgcgcggcgtccactgtcagtcagatcaaattcttatcaccgaggggatccaccaggcgatcgatctggtcacccgcatgctgtgtgataacggcgatctggcgtgggtggaggagccttcctactgggggatccgccacgtgctggcgatgaacgacgttcgggcagagcccctgaccgtcgatgccaacggcctgtgcccgccggagacggttgacgatgcgccgaggctgatcttcgttacgccttcccaccagtatcctctgggcgcggtgatgagccttgagcgccgccagcgcctgctggcactcgcccgtcagcaggggagctggatcgtcgaagatgattatgacagcgagtttcgcttttccggtcagccgatccccgccctgcagggtctggtcgccgacgccccggtggtctatatcggcaccttcagcaagacactctatcccggcctgcgcctgggctacgtggtgatcccgcggccgctggtcagcgacctgaagcacgcccatgccgagctttaccgcggcggccattcgctgatccagatggcgctggcggagtttattaccgccggccactattcggcccatatccgccgtatgcggctgctctacagccgtcgccgcgcctttttaactgagcttatccagcggcactgtatgccgtacgccctgtctgacttcagcgataaggccgggctgcatttgatcctcaatttgcccgcagaggctgacgatgtggcgatcgccagagaggccaatgcgcggcacattctggtgcggccgctgtcgcgctactacctgacggcggcgcgcaagaaaggattactgatgggattcgccagccagcccgaagagcagatggcgtcggcgttcagcgtcttactcggctgcctgcagacgcactgcccgcagatgctcctgcccccgggggacgcagaaaaacaaaacgccccaacctgaggcggggcgttatcgtggagcctgatatcaggtatcaggcaggcgtggcgtatcaggcttcgatagcggcgcgcagttttttcatggcgttcttttccagctgacgcacgcgctctgcggagacgccgtagcggtcggccagttcctgcagcgtggacttgttatcttcgtccagccagcgggcgcggatgatgtcctggctacgctcgtccaggccctgcatcgcgtcagtcagcttattcgccgcctgctcttcccagttatcgtcttcgatgccgtcggcaaagttagacgttttgtcctgcagatacaggaccggcgccatcggctggctgtcggactcatcgtcggacgacatgtcgaaggtcatgtcctgggccgccatacgggattccatctcgcggacgtctttgctcgacacgcccagctcacgggccaccatttccacttcatcctgattgaaccaacccaaacgctgtttggttttacgcaggttaaagaacagcttacgctgtgctttggtggtagcgaccttcacaatacgccagttgcgcagcacgtattcgtgaatttcggctttaatccagtgcacggcgaaggagaccaggcgcacacccacttccgggttgaagcgacgcacggctttcatcaggccgatattgccttcctggatcagatccgcctgcggcaggccatagcccgagtagttacgagcaatgtgaacaacaaagcgcaggtgagacagaatcagctttttcgctgcttccagatcgccctggtaatgcagcttttcagcaagctcccgctcttcatcagccgacagcatcggccaagtgttagcggcccggatgtacgattccaggttaccaacgggggctaaagctaaagtttgcatttctttggtcattcaaatcctctcaattgatatcttctgacgcgttcttgtccccatcaggcaacaagcatgccagcattcatgagcaacgagaatatcactcacattagtatcagacagtgattttatccacaagttccatgcaacggtgtgaataaattacgcacaaaatgtgacaccacgatgaaaaagtgagggcaggaaaaggggaacaagcttgcggtatctttccctgcgaacaggaactcattgcagcagggaaagattatatcacgcttttattaatcgggagtaaagtgacgtaaatgttgcactgtcgccagccaggcggctacccacccgatcatcgagcagacgatcaacatcaacagacactcgtcgaagcctaagccgctcagctcaaactgggtgccgaagactttcgccacttcggtcaccgccgacgagaggcgcattaccagaatctccgacaggatcagcgataaaaacgcgccggaaaagcccagcatcgctccgccgtagaggaacggacgcaggataaagccgtcggtggcgccgataagcttctgaacgttaatggtatcgcggcgggcgaagatgctcaggcgcacgctgttgccgatcaccaggaacaccgccgccaccatcagcacgccgatcatcgccgacacgcgtcctaccagcccggtgagcgaggagagacgggcaaaccaactgtcgtccatccgcacttcatcgacgccctggatccgcgttacccgatcgcgcagggtattcagcgcctcggtgctctggaaatccagcttcggcaccacgatggcgaccgccggcagcgggttctcctccagcatatccagggcgccgccaaagccagaccagttacggaattcccccagcgcctcgtcacgggacaaatagtttaccttgtcgacgccctgctccgcctgcagctggcccaccacccgcgccgcggcatcgtcatccagcgttttttccagataaacggtgatctgcggcgagggataatactgggacgccgcgctgctgacgtttttgtagaccatgtagcagacgcttggcagggtcaacgaaatggcgatgaccattaccgtcaggaaggtcgccagcggcgtgctttttagatcctgcagcgcgccgtgccaggcatagcgcacctgctcgttgaatacgttgctcttacgcgaggccgggttaggcgccgctttcggccgttttggcgcattgcgcccgccgccgccgccgcccgcggcgttgcgcaggcgatcgaacttgctgccgaactggcgaatctggttcattgcgtcgcgcttattcaccccgaatgcctccatgcagatggccgtcgctaagcgtcagcacgcggtacggacgactggagataagccccagatcgtgcgtggccatcagtaccgtcaccccgacgcggttaaactcttcaaacagacgtaaaatcccctccgagagcgcctcgtcgaggttgccggtcggttcatccgccagcagcaccgccggcttgttgaccaccgcgcgagcgattcccacgcgctgctgttcaccgccggagagctgaatgggaaaattcttcgctttgtccagcaggccaaccttgtccagcgccgccgagacgcgacgacgaatatcatcgccgctggcgccggcgataatcagcgggatcgccacgttgtcatacacggtacgatccatcagcaaatggtggtcctggaaaatcataccgatctggcggcgcaggaacggcacctcacggctcttcagacggctgatttcatgaccgctgaagaagattttcccggcgctgggccgttcgataccacagataagcttcagcagggtactcttccctgcgccggaatggccggtcagaaacgccatctcgcccggctgcaggtggaaggtcaccccctgcagcgcttgtctcccaccgagataggctttgctgacttgttcaaagcgaatcattcttaatcctctcgggcaaaaagtgcctcaataaagtcgcccgcattaaacggacgcagatcctcaatacgctcgccgacgccaatatagcgaatcggaatgccgaactgatcggccaccgagaagatcacgccgcctttggcggtgccgtccagcttggtcagagtgatcccggtcaatcctaccgcctcatgaaacagtttggcctggctaatagcattctgcccggtgctggcgtcaatggttaacatcacctcgtgcggcgcgtcgacgtccagctttttcattacccggacaatcttcttcagctcttccatcaggtgcgatttattttgcaaacgcccggcggtatcggcaatcagtacgtcaacatggcgcgccttcgccgcctgaatggcgtcgaaaatcaccgaggcggagtcggcgccggtgtgctgggctatcaccgggatattattacgctggccccagacctgcagctgttccaccgccgccgcacggaaggtatcccccgccgccagcatcaccgacttaccctgctgttcaaactgacgcgccagcttgccgatggtagtggttttccccaccccgttcacgccgaccatcagaataacaaatggcgttttgccttcaacgttcagcggctcgtctactttggcgagaatctcgcccatctcttctttcagcaggccgtacagcgcttccgcatcgcgcagctgcttacggctggcgccttccgtcaggttggtaatgatcttgcgggtggtttccaccccgacgtcggcgatcagcagctgttcttccagctcttcaaacagatcatcgtcgatcttcttaccgcggaacaggctgataaatccggaaccgagattttgcttcgttttcagcaggctacgtttgaggcgggcgaagaaaccttcttttgtcggtttttcctgctcctgagccagcgcttcaagcggcgcctcgtcctcgggcgccggcaccactaccgccgcctcttctgccgcttcggccgccagcgcctgcgcttccagctcttcatcgcttaacggcgcgtcctcttcgggcgcttctgtctcctgcggctggacaacgatgccttccacaggctgctctgctacggcttccgccaccaccggttcggcgataacctcttccgccagcggctcaaccaccgcaggctgttcaggcggttcgctgaccgcgggctccggttcaacaacaggcgtttcttcggtcagagcaggcgtttccacccactcttcttcctgcgcgctggcaggctccgcgaggtgcgctttttcgctttcgaccaccgtctcggtcacttcgacgacgtcttcggcaaacgcctccgggtctgctttcggcgcgctcggctcagcaggggtttcaaccgccggtatctcttcggcaaccgcttgctgttcttctactttttgctctgtctcggtttcctgtgcctgttctttctgtccaaagcccagccaggaaaagaagccacgttttttctcttttgccatttgcgaccacactcctcgctgtttattcatggcgcagcttcatcagaagctgaaaaaatgatgaaattagttggatagtctatcacttaacttaactcgcagcaccgcccccggattaaggtttcgtcaaccgccgtcgatcgctagaatagcaggctggaagttgagacttgagcagagagatgaaaaaaccaaaccacgcgggcagcggtcagatccgcatcatcggcgggcaatggcgcggccgtaaattaccggtgccggagagcccgggcctgcggccgaccaccgaccgggttcgcgaaaccctttttaactggctggcgccgtccattgttgacgcgcactgcctcgattgctttgccggcagcggcgcgctggggctggaagcgctgtcccgctatgcggccagcaccacgctgctggagatggagcgcggcgtagcccagcagctgcaaaaaaatctcgccaccctgaaagcggatcgcggcaaggtgatcaccaccaacaccctcagcttcctgagccagccggggaccccgcaccagatcgtgttcgtcgacccgccgttccgtcaggggctgctggaggagacgctacgtctgctggagacacaaggctggctggccgatgaggccctggtgtacgtcgaaagcgaagtcgaaaacggcttaccgccggtgccggctaactggcaattgtatcgtgaaaaagtggccggacaggtcgcctaccgtctttaccaacgtgaggcccaaggagagcaccatgctgattaatttaggccgcctgctgatgctgtgcgtctgggcctttctgttattgaatctgtttcagcccttcccgaagccgctgaatatctttgtcaacgtcgcgctgattttcatgatcctgatgcacggtctgcagctgacgctgctcaaggcgacgcagccgaaagaggcgccgccgctgagccgctttgagcaaatccgcatttttattttcggcgtgtttgagctcgtcgcctggcagaaaaaactgaaggcgacgctgaaaaaatagtcctgaaaagggctcagggatcgggcgtaaacgccacgaacgctgtgcccttataactcaacattccacgatcgccgacgctcagcgcgtgatattgcggcgcgtcaaggcgaaacaccacctccagaccaccgttttcggggcgaaagctcgcttcatagcgcatctcactgcctgcaggcgtcaccgtctgctgccgcgatcgccgatcgttaatcactttttcccgtttattgctgacgataacccgcttttgtagcaacggcgcggcgtcattcgcctgtttctcacggcgctgctggacatagcgaaacgaagccgccaccacaatcaccgcgacgaccagaacaaaaaagaggggcattttactcatcaaggttacccataaaaaatatcaggaatcagcatactgcgtcgggaataacattgtcatctgctacaccaaaccactacactgagtagtagcatcacgcatccgtaactttctttatgataacagatacagggacttactatgctttggtcatttattgctgtctgtttctccgcatggctttatgtcgatgcatcctatcgtgggccggcatggcgacgctgggtttttaaacctgtcaccctgattctgttgctgttactggcctggcaggcgccgatgttcaatgccatcagctatctggtgctggccggcctgtgcgcctcgctgctcggcgacgccctgaccctgctgccgcgccagcgggtgatgtacgcggtgggcgctttcttcctgtcacatctgctgtataccatctggttcgccagccagctgacgctgtcgttcttctggccgctgccgctggtgctgctggtattcggcgccctgctaatggcggtgatctggagtcggctggaagagatgaaaatgccggtgctgacctttatcggaatgacgctggtaatggtctggctggccggcgagctgtggtttgcccgccccaccaacaccgcgctgtccggtttcgccggcgcagccctgctgctgctgagcaatgccgtgtggctggtgagccactatcgtcgccgcttccgcgccgataacgccatcgccgccgcgttctactttgccggccacttcctgatcgtgcgcgcgctgtacctgtaatttagtccttgactctggagtcgactccagagtgtatcctacggctaatgagaaaattatcatttcccggagggtgccatgtcgactccagacacgcaggataaaaaagtcccacaattctcgtctttcaccatgcggccagcgaccgccccggcggagagctgctgtacagatcacgcctgcgccacagagtccgcccctgccgccgaagcgcttagcgacgcccgctatagctggcaagttgatggcatggactgcgccgcctgcgcccgcaaggtggaaaccgcggtccgtcaggtgcccggggtcagtcaggtccaggtgctgttcgccacagaaaagctgctggttaacgccgagggcgatgtccgcgctcaggttgagaacgcggtccgccaggcggggtatacgctgcgcgatgccgatgctcccgcagctaagcaaacccgagggtcgctgctgcgcgacaatctgccgttactgacgctggttatcatgatggccttgagctgggggctggagcaggccaaccaccctgccggtcagttggcctttattgccaccaccctggttggcctgtggccggttgctcgccaggcgctgcgcctgatcaagagcgggagctggttcgccattgaaacgctgatgagcgtcgccgccatcggggcgctgtttatcggcgccactgcggaagcggcgatggtcctgctgctgttcctgatcggcgagcgtctcgaaggctgggccgccagccgcgcacggcagggggtgagcgcgctgatggcgctgaagcccgacaccgccatccgtctgcgcaacggcgtgcgggaaaccgtcgcccagcgcgacctgcgtcccggagatgtgattgaagtggctgccggcgggcgtctgccggcggatggccagctgctgtcgccgtttgccagctttgatgaaagcgctctgaccggcgagtcggtgccggtggagcgtcaggccggggaacgggtagcggcgggcgccaccagcgtcgaccgcctggtgcagcttaccgtgatatccgaaccgggcgacagcgccatcgaccgcatcctgaagctgattgaagaggctgaggagcgtcgggcgccgatcgagcgcttcatcgaccgcttcagccggatctacaccccggccattatggtggtggccttgttggtcgccattgtcccgccgctgttcttcgccagcgcctggctgccgtggatttataaaggactgacgctgctgctgatcggctgtccatgcgcgctggtcatctccacgccggcggccatcacctccggcctggcggtcgccgcccgccgcggggcgctaatcaaaggcggcgcggcgctggaacagctgggccaggtgcgccaggtggcgttcgataaaaccggcaccctgaccgtcggccagccgcaggtgacttcggttattgccacggccgaagttgacgacaacgcgctgctggcgctggcggcggcggtggagcaaggctccagccacccgctggcgcaggctatcgtccgtgaagcgcagcggcgtcagctgagcattccgcttgccagcggccagcgggcgctggcgggctctggtatcgaagccgaagtcaacggcagccgcatcctgatctgcgcagccagcaaagccgccccggcagagcatgaggcgcagatccagcagctggaaagcgccgggcaaacggtagtgctggtgatgcgcggcgagacgctgctcggcattctggcgctgcgcgataccctgcgcgacgacgcgcgtcaggcggtggatgctttgcatcagttgggcgttcagggggtgatccttaccggggataacccgcgcgccgcggcggccatcgccagcgaactggggctggaattccgcgccggtctgctaccggcagacaaggtcaacgcggtgatagcgctgaatgccgacgcgccgctggcgatggtcggggacggtatcaacgacgcgccggcgatgaaagcggccaccatcggcatcgccatgggcagcggaaccgacgtggcgctggagacggccgacgccgcgctgacccataaccgtctgaccggcctggcgcagatgatttccctggcgcgcgccacccacgccaatatccgccagaacatcgcgattgccttagggctgaaggggattttcctcgtcaccaccctgctcggcctgaccggtctgtggctggcggtgctggcggataccggcgccaccgtgctggtaacggctaacgcgctgcggttattgcgtaagaagttgtagcatcgataccggcttccctgctcgcgctacgcttagcagggctacggttccagaccgtcgggtagcccggataaggcgctacgcgccgccatccgggagaggctcagggacgtaggccaggtcaggcgcagccgccaccggggaaaatatcggacactgtgcctgaaatagcgcccggcggcgctgcgcttgcgcgggcctacgggtggagcggtttgttgctgctgtaagccgggtcaggcgtagccgccacccggcaaaagacaacataacggcataaaggggtagcccggataaggcgctacgcgccgccatccgggagaggctcagtggcttttgcggatcaggtagcggtacggcagggcttcggtttcctgggccaccagctcatgctccataaagcggcagaatcccgggatatcgcgggtggtggccggatcgtcagcaataatcagcagcgtctcgcccaccggcatcgtccgcacggttttacgcaccatcatgaccggctccgggcagcggagtcccagggcatccagggtgtggtcaggagtggagaaaagttcgctcattttagtctcacgtcaacaaaacggccctagtttaccccctgctcgccagtacgcaagacaggttaacgtttgcgcgaaaaacaaccattgcattacgccggcaacgcagtatcatgcagccgtttttaattgggttccctcaccccaacgttccgctgccgattgctcattcacctgaagcatgacgggcataaaaaggtcacaatatgaatccgtttactaccgtacagcgcaaaaaagcgctcgtctggctttcgctatttcatttgctggtcatcacctccagcaactatctggttcagctgccgatctccatctttggtttccataccacctggggcgcgtttagttttccgtttattttcctcgccaccgacctgacggtgcgaatttttggcgccccgctggcgcgacgcatcattttcgcggtgatggtcccggcgctggccatctcttacggcatctccgcgctgttctacatgggcgaatggcagggctttgccgcgctgggcacctttaatctcttcgtcgcgcgcatcgccgtcgccagctttatggcctatgcgctggggcagatcctcgacgttcacgtctttaaccgcctgcggcagagccgccgctggtggttggcccctaccgcctcgacgctgttcggcaacatcagcgataccgtggcgtttttctttatcgctttctggcgcagcccggacccgtttatggccgcccactggggggaaatcgccctcgtcgactacagctttaaagtgcttatcagcatcattttcttcctgccgatgtacggcgtgctgttaaatatgctgttgaaaagactggcggataaatctgatttgtcggcattacagccgagttaaaggtactcgcgggctgatgtgttaagatagccggatgagccattagtggccgtttatcgaaaggaagatgtcaatgcgcaatttggttaaatatgtcggtattggcctgctggtgatggggcttgccgcctgcgataacagcgattcaaaagcgccaaccgttggcgcagcagcggagagcaatgccagcggccaggcaatcagcctgctggatggcaagctgagcttcaccctgcctgcgggcatggccgaccagagcggcaaactgggtacccaggcgaacaatatgcacgtctactctgacgctaccggccagaaagcggtcatcgtcatcgtcggcgacagcaccaatgaagatctggcggtgctggcgaaacgcctggaagatcagcagcgcagccgcgacccgcagctgcaggtggtgagcaataaaccgctggagattaaaggccataccctgcagcagctggacagcatcatctccgccaaggggcagaccgcctggtcttccgtgatcctcggcaaagtggatgacaagctgctgaccctgcaggtcaccctgccggcggataaccagcagcaggcgcagaccgaagcggaaagcatcatcaacaccctcaccatccagtaattactggcctggtgcgctggcctccggttcgctaaccgggggccgtttttttagccgccagcccaacagcagcgccgccatcaccagccccgccgcggcgagataaatcatcgagatcccggtccacgccatcagcaatccggccagcggcccgctgacgcccaacgacaaatccataaacacggtataggtcgccagcgccgacccctgattgtgctgcggcaccgctttcaccgccaccacgcccagcgccggaaagaccagcgaaaagccagccccggtaaggaaagtaccgattttcgccatcatcggcgtatcggcaaagccgaccagcagcaggccgatcgcctccacgctaaagcagagcatcgccacgttcagcccgccgagtcggttaatggcgttgggaaacagcagccgcgcgccaacgaatgcgcagctgaataatgtcagcgcgaaagccgcgccgtcccaacctttggcgtcataaaatagcgtgataaaggtggcgatcaccccaaagccggcggaggccaacgccagcgccatgccgtagggccagacccggccgagcaccgcgcgaaacgacatcgctttgcctttggcagccttcaccgccgcgcggggcagcgcgcagaggatagccaccagcgctaccgccataatgaccccggccagaccgctgagtccaatgtgcgaatagcacagcacgccgagcggcgcgcccatcgccatcgccccataggtcacaatcccgttccacgagatcacccgcccgatatgcagcgaaccgaccacgccgacgccccacagcgtcgagcctgtgccggcgaagctctggccgataccaaggatcacccgtccgaggcatagcagcagcaggctaatcagtggccagccgctgccccaggcggccagcagatagctcaaaccgctcaaaaagcagccgccgaggccgaagacgacaatctttttgggccccagcaggtcggcatagcgcccggcatgcgggcggctgagcagcgtggcgaaatattgcaggctaatcaccagcccggcccagaaagcgctaaagcccatgacatcatgaacatagccgggcagcaccgccagcggcaggccgatggtgaggtagctggcaaagttaaagataacgacagagacaatccgcagattgaggcgcagtccattaagcgccggttcggcgacgggttcgggcatcaggttccaccagatttcgacaaccagctttcactattaccacgctgtcggcggaaaagcagccctcctttcggaatattggcagtcggcgaaccgctacacttatctggcgcgactcataaaaggaatacctatgtcccctccgcaggctgataaagccgggcttcatattttacttaagctggcggcgctggtgattatcctcgccgggatccacgccgccgccgatatcctggtgcagctgctgctggcgctgtttttcgctattgttctcaacccgctggtcacctggttcattcgccgcggggtgcggcgtccgttcgccattaccctggtggtgacggcgatgctggtgatgctcaccgcgctgctcggcgtgctggcggcgtcgctcaatgactttgtcgccatgctgcccgatttcaaccgcgccctgacgcgcaagatcctccagctccaggagtatctccccttccttaatctgcatatcaatccggagcggatgctgcggcgcatggattcagaacggctgatgacctgggccacgacgctgatgacccagctttccggggcgatggccagcatcgtgctgctggtgatgacggtgatctttatgctgtttgaggttcgccacctgccctacaaactgcgttttgccctcaataacccgcgcctgcatatcgccggattgcaccgggcgctgaaaggcgtcacccattatctggcgctgaagacgctgattagcctgtggaccgggctgattgtctggctggggctgctggcgatgggggtacagttcgccctgatgtggggggtgctggcgtttttgctgaactatgtgccgaacattggctccgccatctccgctatcccccccatgctgcaggcgctgctgttcagcggcatctatgagtgcctgttggtaggggcgctgtttctggtggtgcatatggtgctgggcaacatggtggagccgcgcatgatgggccaccggctggggatgtcgaccctggtggtgttcctgtcgttgttggtctggggctggctgctggggccggtgggaatgctgctctcggtgccgttaaccagcgtctgtaaaatctggatggaaaccaccgtcgggggcagcaagctggcgatcctgctcggcccgggccgtcccaaaagccggctccccggctagcggcgtttcaccggccagaagatggtcaatacgccggcgacgatgatcgccacgcccagcagcgattgccagtagaacggctcatgccagccgggcagccagatggcggcggcccacacgaggatatagctcaggctcagtagcgcatacgctttcgacagcggcaggcgatggagggcaaagtaccagcagaccatcgacagcaggtagcccagcaggccgaaaaacaggccgaaagtcccgggctggaaatgcagcagatgctggagaaatgccacaatatcggtcagcggcggcaaggccaccatggcgctgcgcagcagcaactgcgcggcgctgacgaggccgacgctgagtaatgcccagaaaaagcccatcagacgctggtccccagaatgacaatgcccacgacgatcaacccgacgccaagccagtggcgacgggcgaccggctcatgccagatgccccagcccgcgagggtaacccagacgaaattcagactcagcatcggataggcgatgctgaccggaatagactgcaggacgctcagccacagcagcatgccgcagcccagacataacagcgccatccccaaccagaagagtatatggcgactccgccgtccgcgacgggacgggcgggtcgcctgtttctggcagagctgtccggcgcagctcagcaggctggcgcacaccagacagatccagacgctcattgcggcaggtactgaaggaaaacgacccggcccagctcgtaggcgttatccggtttcggtaacggtaagtcgagcatactctctcctttatccatcaacagcaccagcgagaccggcccctgctgacgatgcgcggccagccagtcggcaaaaccggcctggctgacaaagcttccctgagcatccggccagtcgagaccgtacttcagctcaccctgtttgtcgaacataataatatcgcttcgcttcagctcccaggccaggccgccggcgatcccaacgttgttggtcaggacgtaacggctgggctgcagggattcgctgacgatctccacaaggaactgcggctgtttgctgtcgataacccggtccgggatggcgaagcccaccagcagcgccaggccgagcggacagagcgcggcgaggctccagcggcggccagagtctttcatcgccagccagcccatcagcgcccagacggcaaaagcgatcgccgccagcagacatttatacagctcaatcttggtccacaccggcttatgcatgaagccccacggcgagaccaccagcacggcgataagccccagcaaaccaacgcccaggttgatcatcccgttgatgcgcaacgctttcgcgccggtctttgcggcctccagcgcgtagcgggccatcaggatcgacagcggcgcaaagcacggcagaatataggtcggcagtttgcctttggcgatactgaagaacaggaacggcatcgccacccaacctaacagatacagcgcgccgcgggcctcatcgcgctcaagccagccgcgctttagcgcccccggcagcagggccagccacggcagactgccgacgatcaggaacgggatgtagtaccagaacggcgctttgtgctgggcgtctttttcagcaaaacgctgaatatgctcgacccagaagaagtagcgccagaagtccggctcgcgctgggcgatagccagcccccagggcagcaccaccagcgtacagacaatcaccgccagccagccgtaggtcagcacttcacgccagcgtttacgggcgatcacccacggcagaacgcccaccaccggcaccgccagcgccaggaagcctttggtcatcacccccatcccgcaggcgacgcccagcagcacgtagcccagtattttgccgctgcggccctgcgcctgcgccgcgtcccagaagctgcacatcgccagcgccagccacagggtgatcatcgggtccagcaccgcataggtgccaatcgcatacaccagcatcgcggtgaggaagataaccggcgacaggatagctacccgcttatcacgaaagatccgccacgccagccaggccaccagcagggcggtcatggtgatggcgaagaccgacccgaagcgtacgccgaagttattatggccaaacagccactgaccgatactgttgatccagtaaccggcaatcggtttttcgaagtagcgcaggccgagaaaatgcggtaccacccagtcgccggtggccagcatttcacggctgatctccgcgtagcgggtttcgtcgggttgccagagcaaacggaaattgagcggcagcagataatacagcgcaaacagcgcaatcagagagacgccatagcgaatgcttttcatcaaatacccgaagtcagtaattgttcacgtccgagccagccttcccggccagccagttcaccacgaaccactttgcctgagggcagctcgctaaagtcagcgggcagcagctggctcagtgggcaaaactgaatttcttcttccgccgccatggtcagtagttcattgaactgatcggcgtaggcaatgccttccacttcagcgtgaatggtatagaccggaacgcccgcatcgcgatggatgcaatccagcaggtagcggttaaagccggcgatatccaccgccgtgcccaccgcctcgtcccaggtcggcaacgtgaccgggatctgcacggtaccagagacgccgctgccgagctggggcagaaacggccgcgtgccgcgacagtcgctgttgtagagaaaatcgaaggattctttggctttaaccacccgctgatcggcgcgccagccggcgacggccgagcaggtcaccggccggccgatgatgcgctcgagctccagcaggccgcgctcaacctccagcgccagcctttcctgcggccagacgccgctccacgcctgccagctgtagtggtcccaggcgtgcaggccgacttcatgagattcggcggcggcgcggatcaccgcttcgttccctgcgccgatgcggcgccccggccaggcggtgccggccagcagaatatcccagccgtacagcgaggcggctctggaacgcagcatcttccacagaaacttcggttttaccaggcgccacaggtggcgccccatattgtccggcccgacgctgaagaagaagcttgcctggatcccatgccggcccagcagctccagcagccgcggaacgccgtcccgcgtgccgcgaaaggtatcgacatctatgcgtaagccgacctgtttcatggatttttatcgtccaccagttcaaccgtgcgcagaaagaagtccagcgtgtgttcgaccgtttcttccatctccaccttcggctcccagttcaggcagcgtttggcgttgcggatgctcggcttacgatgctcaacgtcctggtagccctttccgtagtaatcgctgctttccacttcacggaagccggcgaacggcgggaagcgatcgcgcagcggatgacgttcgaagcaggcgagcagcatttcggccagctctttgatactcgcttcgttatccgggttaccgatgttaatgatctgcccgtcgcagcggccgtctttgttctcgatgatgcggaacagcgcttcgataccgtcgctgatgtcggtgaagcagcgcttctgcttgccgccttcgataagcttgatcggcgacccttccaccaggttgaggatcagctgagtgatggcgcgggagctgccgatacgcgcggcgttgaggttatccagccgcggccccatccagttgaacggacggaacagggtgaacttcaggccattcttatcgccataggcccagatcacacgatccagcagctgcttggagaccgagtagatccagcgctgtttgttgatcggccccaccaccaggttggagctatcttcgtcgaaatttttgtcggtgcacatgccgtacacttccgaggtcgacgggaagataatgcgcttattgtatttcacgcagtcgcggatgattttcaggttctcttcgaaatccagctcgaacacgcgcagcgggttgcgggtgtattcgataggcgtggcgatggccaccagcggcagcaccacgtcgcatttcttaatgtgatactcgatccactcagagtgaatgctgatatcgccttccacaaagtggaaacgcggacagtcgagaaaacggctgatggcgtcggagccgatatccagaccgtaaatctcatagttgtcgtcctgcagcaggcgctcggtcaggtggttaccgataaagccgttgacgccgaggatcagcacccgggtgcgacgcttaatcgccaccaccggtttgctgctgatcaccgccccggacaccaggcccagcgcctgcgccagctgagcgccctgcatgtacacgccgcgttcggtctggccggtgacaatctccagcgccccgtcctggcacgcgaggatcagcggcgcaatggagagcacggtgcccggtttagctgctggcaaatcgtggcgaacgcgggatttccagacgataaacttgttcgctccggcgtagccgaaggcgcccggccacggatccgagaccgcacgcaccagattgtgcagggtctgcgccggcagctcccagtccagccggccatcttccggggtacgacgccccacataggttgcctggctgtgatcctgcggacgctcatcggtggtgccggcgaggatcgccggcagcgcccggctcagcagctcagtggcggcggcgcacagcttacgatgcagcgtcagggcggcgtcatccgcgccaatcgccacggcctgctgggcgacgatatcgccagcgtctgcgcggttcaccatccggtgcagggtgacgccggtttcgctttcgccattgaccaacacccagttcagcggcgcgcggccgcgatattttggcagcagcgaaccgtgcaggttgaacgcccctttcggcgccagattgaggatctcatcgcccagcaggttgcgatagtagaaggagaacagcacgtccggcttcatctcgcggatacgctcaatccacagcggatggttcacgtcttccggcgcccacaccggaatgccctgctcggcggcaaggcgcgccacggagccaaagaaatggttttcgccagggttatccgggtgggtgaaaatagcagcgatatcatacccggcgtccagcagagcctggataccggtgcagcccatatcgtgataagcgaagactacggctttcatgaacgatcttcctctttagatgccgtttccggctggcgaacaacacgttgaataaagtagcgggggcgggcgcgcacgtcgttatagatgcggccgatatactccccgagcaggcccataccgacaaactgggcgccgatgaacatgaacagcacggcgaagagcataaacaccccttccgccgcccactgcgggccaaaggccagacgcagcaccaccagcagcaggccgaaggcgaagcccagcagggcaatcacgctgccgaaaatgctgagcagacgcagcggcgtggtggtcagacaggtcaccaggtcgtacatcaggttgatcaggcgcatgaagctgtatttggagtcgccgaattcgcgctcggcgtgcatcaccgggatctccaccgcgcgccgggcgaaggtattcgccaggatcgggataaaggtgctgcgctcatggcagttgagcatggcgtcgatgatatggcggcggtaagcgcgcagcatgcagccgtagtcgcccatcgctttgccggtggtgcgctggatcaggcggttgatcatcttcgacgcggttttacggaagatgctgtcctgacggttctggcggacggtgcccaccacgtcgtaaccttcatcagccttcgccaccagccgcgggatctcctccggcgggttttgcaggtcggcgtcgagggtaataatcagatcgccggttacatggctgaagccggccatgatcgccgagtgctggccgtagttacggtttaacagcacggcgacgacgtggctgccttccgcctcggcggcttcggtgagcatgcgcgcggaatcgtcgctgctgccatcgtcgatcaacagaatttcatattgccgccccagggtggcgcaggcggcatccgtacgacgaagcagttccggcaggctatcctgttcgttataaaccgggataaccaccgagaccttcttcacgggagggtaagtaagcatatcaacgtcctgacaactggcgcagtgcggagataacgcgagtgacatcgtcatcggtcatatccgggaacaacgggagagagcagatgcgggcgctgttccattcggtattcgacagggaaacctcagggaagcgctcgcggtaatatttttgcgtatgggccgcacggaagtgcaggccggtgccgatgcccatcgccttcagcttttccatcagcgcgtcgcggctaatgccgcacgcggcctcatcgacgcggatgataaacagatgccaggcgtgctggtgatcccaggtcgggacgctcagcggtttaaacggcgtgtccgccagctcgcgcaggtagcgctgggcaatctcggtccggcgctgattggcgtggctcagtttttccagctggaccagcgccagagcggcgttgatatcggcaaggttgtacttgaagcccggggtgatcacctccgcctgcggcgcgcggccgtgggtctggcgatcataagcgtccacgcccagaccatggaatttcaggctacggatgcgggaggccagctcgtcgtcatcggtgacaatcagcccgccttcggcacaggtcatgtttttgatcgcgtggaacgagaaaatggcggtcccctgccagcccacgtgacggcctttataatgggtaccggccgcatgggcggcgtcttcgatcaccgaaatgccatggcgctcgcccaccgcgcgaatggcgtcgatgtcggctggcgccccggcgtagtgcacgggaattatcgctttggtacgcgaggtgatcgccgcttccaccgctgcaggggtaatcatcagattgtcgttatcgacatcgatcatcaccggcgtggcgcccagcaggcagatcatattgagagtggagacccaggtctgggacggcgtaatgacttcatcgccggggccaatacccagcgccatcagggtcacatgcatcccgccggtcgctgaactgacggcaatcgcgtggcggttgccggtcagctggcagaatgccgcttcaagtgcctgattcttcggtccggtggtgatccagcccgacgctaaaacttcacgcagggctgccagctctgcgtcgcccatcgacgggcgcgaaaaaggcaaaaaatcgctcatcatcatcctgttctgtagatgacccacgcacgaatctgggtcgttagaataaaatatcctgcgcctgcggacttaaacgaaattaaaatgaagtgagttcagcacggcattccatttcagggtatctcgaccactattaatgtagtcgaccttgcttaggataatattaagaaattaatatttcttcggaataagaaataaattcttaataaacagtatgataggatttttttatggcagaaatttgacggagatgcgttcctgtcacgaaaaagagaacaggaacgcaatagttgaaattaaacgagaactaaaccagttcacaatttattattctgtcattgtcacgcttaatgacaaaaagttagcgcagatcacaaagttatttctgctgaattacaaatttgcaggaaaatccgcaggcaattcgctcgccgggcaattaatgacctcgtcattatccgcgccacagtcgcgaatgaaggtgatagtggcgaactcgtcaatcacttccgtcgggtaggccgggccggcatcgcgatacgaattcatcagcggaatatggtcgttctggaagcagatagttttttccgggttattcatgatccagcgcgggaagaaaatagtgccgtggaacagtttgtcgcccaggttgacgatcaggctgacgtcggtgccggtcggttcggtccaggagattttgtagatactttcccccacccgcacaatgtacgcttcctgatctttcacccagcgattgccgacgatgccgctgtgaatacggtagtcgagggtgtggccatttttgacgtaaatctcgtagttccagccgttgtcgtaggtatagaccagatgtttaccgataaagccgctgaggtcatgtttgtcgaaagtgctcatcatttattctcctctgttttgttgaggacagcatacgtctttaaaaaatgaatgaataacgctatgtttggattaaatacattcaaattttagattgattatgcacaagacaaccctggagcagtgggcgttactcgaaaaggtagtggaattggggagctttgccagagcggcggaggagaccaatcgcagtcagtcatcggtaagctataacctcgcgctgctgcaggagcgcttaggcgtggcgctgctggcgccgtccggccggcgggcggtgcggacgccggctggcgaactactgctgaatcaggtcaagccgctgctgcaggccttcgcctacgtcgagacgcacgccgccactctgcgcaacggggcgcggacccgcctggatctggtggtcgacagtattttcccgcgccagcggctgttcgcgattttacgccagtttcagcagcgctatccgcagacccaggtcaggctcacagaagtgctggaaaacctggatgacgagagcgcggcgcggacggaagccgatgtgatggtgctgacccgccgccaggatattaccggccgcggggagtggctgatgaatattgatttcattgccgtcgcccaccgcgaccaccctctcgccgcgctggacggacctctggaggatagcgcgctggcgccgtggccgctggtgcgcattgccgatcagggcggcgatggccaggcgccgcgagacgcctggaccttctccaccattgatgccgccattgatgcggtgatgtatcaggtcggcttcggctggctgccggaggagcgcattcgcccccatctcgaccagggcgtgctgaagcggttgcccctcagccatggcgcgcgccgcgcgacgccgctgcatctgatcgtcaagcgggacctggcgccgatcgacgaacaggtggccacgctgctggcgttgttccggacgccctgaggggtaaggcggcgctggtcgcctgggcgtaatgatacgattttcttatactttccggcgcaatattgatccaggttactcccaaagtatgatgaatcactaaaatcgtcatactttcctgtcgttgagattgccgtcttgtctattatccgcctcaccctgctggcgctggtcgcttgcgtccctctgctggctcaggccgcgccgtaccagctcaccaccgcctggccggttaacgtcggcccgctgaatccccatctctatacgcccaaccagatgtttgcccaaagcatggtctatgaaccgctggtgaagtatcaggctgacggcagcgtacagccatggctggcaacccgctggcgtcactccgccgacggaaaaacctggtggttcaccctgcgcgacgatgtggccttctccaacggcgaaccgtttaacgcccaggccgcggcggccaattttcaggcggtgctggccaaccgccaacgccacgcctggcttgagctcgccaaccaaataaccgacgtgcgggccctcagcgccaccgagctgcagatcaccctgaaaagcgcctacgcccccttactgcaagagctggccctgccccgcccgttccgcttcatcgccccctcgcagtttatcgatggcggcaccgccaggggcattaaagccccgatcggcaccggcccgtggcggctggcaagctcgcagctcaatcagcgcgatgtgctggtgcgcaatgagcgctactggggtcgcaaacccgcgctacagcaaatcaccatcaaggtgatccctgacgccaccagccgggcggtggcgttcgaaaccggggaaatcgatatgctctacggcgatgaagggctgctgccgctggacaccttcgaacgctttcgccatcaccccggctacgtggcgcgcctgtccgccccggcggagacggtaatgctggcgctaaacgccagccagggcccgacccgcgagctgacggttcgcgaagcgctcaactacgccgtcgataaacagacccttgtcgatagcgtgttgtatggcacccagcaggttgccgacaccctgtttgccccctccgtcccttacgccccgcaggatctgacgccgcgccgttacgacccgacaaaagcccgcgccctgctggaacaggccggctggcagcagctggagggccagccctggcgacaaaaagccgggcaaccgctggcgattgagctggcgtttatcggcaccgacgcgctggctaaatcgatggccgaaattattcaggccaatctgcggcaggtcggcgtgcaggtcaccctggtgggcgaggaggaaagcagcatttacgcgcgccagcgcgaaggccgcttcggcatgatcttcaatcgcacctggggcgcgccctacgatccgcatgcctttttaagctcgatgcgcgtcccttcgcatgcggattaccaggcccagcgcggcctgccagacaaggcactgattgataaagagattagtgaagtgctgaccaccggggacgaggcgcagcggagaaaactgtaccatgatgtgctgacccgtctgcatcaggacgcggtgtatctgcccatcagctatgtctcgctgatgtcggtcgcgcgccaggaggtcggggagatcccgttcgccccggtgaccagcgagatccctttcgaccagattaccccggtaacgccataatgctacgctatattttacgccgcctgctgctgctgatcccgctgctgctcgccgcctcagccatcatctttctgctgctgcggctcggcgccggcgacccggcgctggattatttacgcctgtcgaacctgccgcccactgaagagatggttgcctcgacccgcgagctgctggggctcaaccagccgctggcaatgcagtatctgcactggctatggcgggcgctgcacctggatttcggtctctcctatgccacccagcgcccggtgctggacgacctgctgcacttcctgccggccaccctgctgctcaccggcgcggcgctggcgctgatcctcgtcacctccctgccgttgggcatctgggcggcgcgccatcgcgatcgcctgccggactatatcgtacggctgattgccttcctcggcgtctcaatgcccaacttctggctggcctttctgctggtgatgctcttttccgtgcatctgcagtggctcccggcgatggggtatggcgactggcagcacctgattttgcccgccgtctccatcgcctttatgtcgctggcgatcaacgcccgcctgctgcgcgccagcatgctggacgccgccagccagcgtcacgtgatatgggcgcggctacgcggattgagcgcgcgccaggtggagcgccgacatatcctgcgcaatgccaccctgccggtggtgaccgccatgggcatgcacattggcgagctgatcggcggcaccatgattatcgaaaatatctttgcctggcccggggtcggccgctacgcagtttccgccattttcaatcgcgattacccggtgatccagtgctttaccctgatgatggtgacggtgttcgtgctggctaatctggcggtagatgtgcttaacgcggcgctcgacccgcgcctgcgccgccacgaggaggtgagcgcatgagagggctacaaagctttcgctggccggtaaaactggccatgctggttatcgcgctgctggcggtcatcgccatcggcagcggctggtggctgccctgggatccagcggcgattgaccttcagcagcggctgctaccgccgggcgcagcgcactggctcggcaccgatcatctcggccgggatattttctcacgcctgctggccgccacccgcgtttcgctgggggcggtgatggcttgtctgctgctggtgctgctgatcggcctggcggtcggcggctgcgccggactgctgggcggccgcgccgaccgcggcctgatgcgcatcgccgaactgtttatgacttttccgacctcgatcctatcgttctttatggtgggagtgctgggtaccgggctgaccaatgtgatcctcgccattgcgctgtcgcactgggcctggtacgccagaatggtgcgtaacctggtggtttccctgcgccagcgcgaatttatcctcgccgcccgtctgagcggcgccagccagtggcggctgttcagcgaccatctggccggcgcggtgatcccctcgctgctggtgctcgcctcgctggatatcggccatatgatgcttcacgtagccggcatgtcgttcctcggtctcggcgtcagcgcgccgacggcggaatggggggtgatgatcaacgacgcccggcagtatatctggacccagccgctgcaaatggtctggccggggctggcgctgttcatcagcgtgatggcttttaacctgctgggcgacgcgctgcgcgatcgtctcgatccccacctgatcgcggagcatagccactgatgccgcagaagatccaactggaacagatctcgcttgccgctgaccgaccgctggtcagcgacgtctccttcaccctgcgccgcggccaggtgctggcgctgctcggcagcagtggttgcggaaaatcgctgacctgcgccgccgcgctgggcctgctgccgcccggcgtcaggcaaaccgccggccgggtgcttctcgacggcattccggtgcacggcgaacagctgcgcggggcgaccatcgccaccatcatgcagaacccgcgtagcgcctttaacccgctgcagaccatggccgcgcatgcccgggaaacctgccgggcagcgggtcgtgaaacgaatgacgccgtgctgctggcagcgatggaggaggtcggtctggacaatccgcgggcgctactgaagcgctacccttttgaaatgagcgggggcatgctgcaacggatgatggtcgctctcgccctgctcagccgcgcgccctttatcatcgccgacgagccgacgaccgatctcgatgccatcgcccaggcgcgcatcctcgacctgctggcggatattgtcgccaggcgcggtctgggactgctgctggtgacgcatgacatgggcgtcgtggcgcggctggcgcatcacgtaacggtgatggagaacggtcgcctcgttgaacactgcgatgtgaatacgctatttagcgccccgcggcacccgctcagccagcgcctgctggccgcgcatctggcgttatacggtctggagaaaacaccatgaatttactcagcgctaccggggtgagtcacgattatcctcaccacggcagggtcctgcatgcgatccatctcgccatcgcccccggcgaaacggtggccctgctcggacgcagcggctgtgggaaaagcaccctggcgcggatgctggtgggtctggaaacgccgcagcacggtgatattgcctggcgcggcgcgccgctgactgccctgaagggcgaggccatcggcgccttccgccgtgatattcagctggtatttcaggatgccttcagcgcggtgaatccgcgcaaaacggtgcgcgagatcgtcagcgagccgctgcgccttctgttgtgcttgtcgcgtgaggcgcgtgcgcggcgggtggaagagatgctgctggccgtcgacctcgcgtcgtcgctgctcgataagcgcccggcgcagctcagcggcggacagctgcagcgcgtctgcctggcacgcgccctggcggtacggccgcagctgttgatccttgatgaagcggtttcaaatctcgatctgctgctgcaggcggagattatcgccctgctgaagcgtctgcaggcgcagtttgacaccgcctgcctgttcatcacccatgacctgcggctggtggagcgcttttgccagcgagtgctggtgatggagcacgggcgcatcgtcgaaaccgcaacggttagtctaccgctacgcctgcgctcccctgccggacaggcgctccagcaggcggtgctccccccttttcctgccactctgcttaacgaggccatgccatgcagcgcgtaaccctgacccttgatgatgacctgctggccgccctcgatgcgctcagcgcccgccgcggctaccacaaccgttcggaggcggtacgcgatattctgcgcgacgccctcaaccaggatcctccgtcgccggaatcacggcgcgggtatgccgttctgtcgtacgtgtatgaacatgagaaacgcgaactggcgagccggctggtggccacccagcatcatcatcacgatctctccgtcgccacgctgcatgtgcatatcagtcatgacgactgcctggagattgcggtgctgaaaggtgatatggccgaggtacagcattttgccgacgacgtgattgcccagcgcggcgtgcgccatgggcatttgcagtgtttagcggatgattaattatttgaaaattcttgggtggtttatcaacagttgataaaccacataaactatacgctttgtgaattatccctcttcgccaataatggcgcctcatttaacgatctcgttatggcgaggctcctgcataaatacaagttaccgccctgttggtatcgagagagaccactcagggaaatacaggcttccatcgaatcaaggtgttgccaaggtaacttctggcggtcatgaccgttcagatacgttatgcagtgctaaaaccaggacgtagggatctgcctgcgctaaccctgtcttgttcgcccctatgagtgattttttatagggatttttaaacatgtcttccattcaactctgcgccgcccatcaggcgacctctggcttcgacggcgatgcgatcgtccagtacatgcgtaccgattttattacgctgcaggaacatctcagcgttcatgaggcgcgcgaacactttatctcccagctggccagcgatgatattcccgggcaggtgtttgtcgtcgccggcaagaagctgcgtggcagcctgtcggtcaaaaagctactccaggaaacggatatcaaccagtctatccgccacctgatggacagctgcctgtttcgcgtcaaacctgacgatgagcgccagcaggtgattgccgagctcagcgagcgcggcctcgacctggtccccgtcgtcgataaaggcgagctggtcggctgcctgatggagaaggagatcgcccatctgctggaggatgacgtcaccgaagatgctcagctgcagggggcaacgctgccgctggaaaaaccgtacctcgagatcagcccctggacgctgtggaaaaaacgctcggtgtggctgctgctgctgttcgtggccgaagcctacaccagcagcgtactgcagcatttcgaagaagccctggaatcggccatcgcgctggccttctttattccgctgctcatcggcaccggcggcaacagcggaacgcagatcacctcgacgctggtgcgctcgatggcgctgggggaagtgcgactgcgcgatatggggcgggtgatccgcaaagaggtatcgacctcgtttctgattgccctgaccctgggcctggcgggctgcctgcgcgcctggatgatggggattggcatggaaatcacgctcatcgtcagcctgacgctggtgtgcattaccctgtggagcgcgattgtctcctcggtcattccgatggtgcttaagcggatcggcattgacccggcggtagtttccgcgccgtttatcgccacgctgattgatggcaccgggctgattatctatttcaaaatcgcccagtattttcttgggttgaactgatcatatacgtccgggcaccagggcgcccggacgcgtagattacccttccaccagcgcctgcgcgcaggcccaggcgcttgaccacgcccactggaagttataccccccgagccagccggtaacgtccatcacttcgccgataaagtagagacccggcgccttacgcgcctccatagtacgcgacgagagttcgttggtgtccacgccgccgagggtcacctccgccgtccggtagccttcggtgccgttcggctgcacgcgccaggcggttaacgtctccaccagcgtctgctgatcgcgaacgttcagttgcttgagcgtcacatcaggtatctgccccagctgctgcagacactccaccagccgcttcggcagctgcatcgccagggtgttcttcaggctctggttgggatgcgcgctgcgctgctcgttaaggaagtcatcaagatcgcagtccggtagcagattaacggtgacgaactcgccgggctgccagtagctggaaatttgcagcaccgccggtccggaaaggccgcggtgggtgaacagcagattttcgcgaaacagagtgccgttctcggcggtaatggtcgacggcaccgacacgccggagaggacctgcagctgctcaagcaatggcttgtggagggtaaacggcaccagccccgcgcgggtcggcagcaccttcaggccgaactgctcggcgactttatagccaaacggcgaggcgccgagccccggcatcgacagaccgcctgaggcgatcaccagctttttggtcaccagcgtttcgccgttcacctgtagccggtagccttgttcatcgcgctccacgctgaggatttcgctgcgcagacggatctgcacgccgcccttttcacattccgcgagcagcagattgacgatctgctccgccgaatcatcgcaaaacagctggccgagggtcttctcatgccaggcgatgccgtatttaccgaccagctcgataaagtcccactgggtgtagcgcgccagggcagatttgcaaaaatgcgggttttggctcaaataggccgccggttcaacatacatgttggtaaagttgcagcggccgccgccggacatcagaatttttcgccccggctttttgccgttatccagcagcaggacgcggcagccaagctggcccgcctgcgctgcgcaaaacattcccgccgctccggcgccaacgacaatggcatcaaacctttccacaccgcgttcctcgttccccaattgtcgggttttgtaaatatttcactctggtcacaccagcgggaaaaatcccgcattagatacatcattgaaagatataggattactcccaacagggtaaaacctaaacaggaagaaaatcaaaaaaagtctatatttcactttgcccgcgccgctaaagtcactgataatgcgccgcgttcatgtcctcaaaatggcgtaacgtcctatgctacatttatttgccggtctggatttacataccggactattattattgcttgctttagcttttgtactgttttacgaagcgattaacggtttccatgataccgcaaacgcggtggctacggttatctacactcgcgcaatgcgctcacagctcgctgtggcgatggcggcgctcttcaacttcttcggcgttctgctgggcggtctcagcgtagcctatgccatcgtgcatatgctgccgaccgatctgctgcttaacatgggttccgcacatggcctcgccatggtgttctctatgctgctggcggcgatcatctggaacctcggcacctggtacttcggtcttccagcttccagttctcataccctgattggcgccatcatcggcattggtttaaccaatgcgctgatgaccggtacttccgtggttgatgcgctgaatatcccgaaagtcatcggtatttttgcttcgcttatcatctcgccgatcgtcggtctggtgatcgcgggcggcctgattttcctgctgcgtcgctactggagcggaaccaaaaaacgcgcgcgtatccacctgacgcccgcagagcgtgaaaagaaagacggtaagaaaaagccgccgttctggacccgtatcgcgctgatcctgtctgctattggcgtgtcgttctctcacggtgctaacgatgggcagaaaggcattggcctggtgatgctggtgctgatcggcgtcgcgccggcgggtttcgtggtgaatatgaatgcctctggttacgaaatcacccgtacccgcgatgcggtcaacaacgtggaaaccttcttccagcagcgtcctgaactgctgaaaaaagccaccggcgtcgatcagctggtgccttctccggataccaataccgcggccaatggcgagttccactgccatccggcgaacaccatcaacgcccttgaccgcgtcaaaaccatgctgaccggcgttgagaactacgagtcgctaaaaccggaacagcgcggccagctgcgtcgcatcatgctctgcatctccgacaccaccgacaaggtggcgaagctgccggatgtgagcgctgacgaccagcgtctgctgaagaaactgaaaaccgatatgctgagcaccatcgagtacgcgccaatctggattatcatggctgtcgcgctggcgctgggtatcggcaccatgatcggctggcgccgcgtggcgaccaccatcggtgagaagattggtaagaaaggcatgacctacgctcaggggatgtcggctcagatgaccgcagcggtttctatcggtctggcgagctacaccgggatgccggtttccaccacccacgtactctcctcctcggtagcggggacgatgctggtggatggcggtggtctgcagaaaaagacggtgaccagcattctgatggcctgggtgctgaccctgccggcagcgattatcctttcaggcgtcctttactggctctccctgaaactgatttaagcgttattcgttcaaaacgggccagcttgctggcccgtttttttattctgaaacgttagtgccagatcatcagcgcaatcaggctcaccaccaccaggccgcacagggcgctggtcaggataaactggcgacgaacacgttcgcagcgacgaataaattcatcatcgtgatggtcacggtagcgctgggcatagatataccacaccagccgcatctgtttgctgggctgcccgtgcgaggtaaaaaagccgccgccatcaacatactgatagagcaagggatcgcaaccacgtagcaccaccaataatgcacgcaacgatgagaagtagcgtgccatattcaccacacaaacgacacacagggcccaaaacagcgcaatagtgctgatcatacctcctccccggcgacccgcctacggagaaaacctccgcggctaccgctccccaaataacccacgacgataccgtaaagagtgcgattccgatcacatttatttttccgaccggctcattaaatagtgtaggagatccattaatttttttaccacaaggttattcgttatcaatacgtaagacggataaatttgtttaacttttaggtgaacccagtgcattgacggagtgcggggggcgctataaggtaggaaatatcttctacaatgaagtccttaaaggctaccctcccgcgaatgtagcacgcaggacgcgggcgaaacggcagcgccagctgtcaggtccaatggtcatcgacaaacttatggaaggagtaacactatggcttacaaacatattctgattgcagtagacctgtccccggagagtaaagtactggttgaaaaagccgtttctatggcccgcccgtataacgcgaaagtctccctgatccatgtggatgtgaattactccgacctctacaccgggctgattgacgttaacctcggcgacatgcaaaaacgcatctccgaagagacccatcacgcgctgaccgagctctcgaccaacgcaggctatcccatcaccgagaccctgagcggcagcggcgaccttggccaggtgctggtcgatgcgattaaaaaatacgatatggacctggtggtctgcggccatcatcaggacttctggagcaagctgatgtcctctgcccgccagctgattaacaccgttcatgtcgacatgctgatcgtcccgctgcgcgacgaagaagacgaataaccgtctcgttttatccgcgcaatacgcccgccgatgcgggcgttttttattttcgctttccctcgccatgcggcagaacttcaatccataaaatcgccattcaattagtgtgatcaaccagttattcggcgaaatatctatataataatctattccataagccaataaccgcagcatggcgagttatcagacattttcggcgcgttctggcatacgcgttcatactttttgggaaagtaatacaaggcgaaggaatatgaatacaactgcacctacgggcttgctgcagcaacctcgtccgttctttatgatcttctttgtggagctctgggaacgttttggctattacggcgttcaggggatcctggcggtcttctttgttaaacagctgggcttctctcaggaacaggcctttatcaccttcggcgccttcgcggcgctggtttacgggctgatctccatcggcggctacgtgggcgaccatttgctggggaccaaacgcactctggtgctcggcgccattgtgctggctatcggctactttatgaccgggatgtcgctgctgaaaccgcagctgatctttatcgctctcggcaccatcgccgtcggcaacggtttgtttaaagccaacccggcgagcctgctctccaaatgctatccgccgaaggatgcccgtctcgacggggcatttaccctgttctatatgtcgataaacatcggttcgctgctgtcgctgtcgctggcgccggtgatcgccgaaaaatttggctacgcggtaacctataacctgtgcggcgcggggctgattatcgcgctgctggtctacttcgcctgccgcgggatggtgaaagatattggctccgagccggatcatcgccccctcagcctacgcaatctggcgctggtgctggccggtacggtggtaatgatttttctctgcgcctggctgatgcataacgtgatgatcgccaacctggtgctgattgttctgtcggtcgtggttattgcgttctttttccgtgaggcgtttcgcctcgataaaactggacgcaacaaaatgttcgtcgcctttattctgatgatcgaggcggtgctgttttacattctgtatgcccagatgccgacctcgctgaacttcttcgccatcaacaacgtccatcatgagatccttggctttaccatcaacccggtcagcttccaggctctgaatcccttctgggtagtggtcgccagcccggtgctggcggcgatctacacccatctcggtcataagggtaaagacctgaccatgccggtgaaatttaccctcgggatgttcctctgcgcgctgggcttcctgaccgccgcggcggccgggatgtggttcgccgacgcccaggggttaacctcgccgtggtttattgtgctggtctatctgttccagagtctgggggaactgttaatcagcgctctggggctggcgatggttgccgcgctggtgccgcagcatctgatgggctttattctggggatgtggtttctgacccaggccgccgctttcctgctgggcggctatgtggcgacctttaccgcggtgccggaaaacatcaccgacccgctgcagaccctgccggtctacaccaatgtgttcagtaaaattggcctggtgacgctgggcgtcacggtggtaatggcgctgatggtgccgtggctgaaccggatgattaatacaccggccagcgccgagtaaccgtttaagatggccgatccgcactggcgccgtttgttcagatattgtggttcccggcttgcgctacgctgagccgggcgacaattcggtagcccggataaggcgcgttgcgccgctatccgggagttaccaccacggcgtaatattactccggcgtaccggcgtaaatatcaaaccgatgccctttggtcaccaccgcattcggcgtggcgacttccgccagcggcggcgcgtaatccgggcgcttcaccaccacccgcttggtcgccagctggcgcgccggggccagcaggccatcggcgtctaaatccggccccaccagcgactgaaagacgcgcatctctttcttcaccagcgcgcttttctgcttatgcgggaacatcggatcgaggtacaccacctgcgggcgcggggtgatatcggttaacgccgtcaggctggaggcgtggatcagctgcagccgctcctgcagccagccgccgatttccgcgtcagcatagccgcgcgccaggccatcatcgagcagcgcggcgaccaccggattacgctccagcatccgcacgcgacagccgaccgacgccagcacaaaggcatcgcgtcccagcccggccgtcgcatcgacgacatccggcaggtaatcgcctttaatacccaccgctttagccaccgcttcgccgcggccgccgccaaacttgcgccggtgggccatcgccccgctgacgaaatcgacgaagatgccgccaagcttgggctcatcgcgcttgcgtagctccagatgctccgtcgtcagcgccagcgccatcgggttatcgtcatcctgctccagcccccagcgggcggctaaaacagataaggcgccgtcaccggcgcctgtttcatcaattaagcagatcttcacgtagcaatcagcctttgatcccgtaatgctccagcatcgcgtccagctgcggctcgcgcccgcggaagcgtttgaacagctccatcggctcttcggaaccgccgcggctcaggatattgtcgaggaacgactgaccggtttcacggttgaaaatcccctcttcttcgaagcgtgagaaggcgtctgccgccagcacgtcggcccacaggtagctgtagtaacctgccgcatagccgccagcgaagatgtggctgaaggcgtgcgggaagcggccccaggtcggccccggcaccacggcgacctgctttttaatctcggccagggtctcaaggattttcgctccctgctccggtttgtactccgcatgcaggcggaaatcgaacaggccgaactccagctggcgcagaataaacatcgccgcctggtagtttttcgccgccagcattttctccagcagctcctgcggcagcggttcaccggtttcataatggccggagataaacgtcagcgcttccggctcccagcaccagttctccataaactggctcggcagctcgaccgcatcccacggcaccccgctgatgccggaaaccccggcggtgtcgatgcgggtcagcatatggtgcagaccgtggccgaactcgtggaacagggtgatcacttcgtcatgggtgaacagcgccggcttgccgttgaccgggcggttgaagttacaggtcaggtaggcgaccggcttctgcagggaaccatccagtttacgcatctggccgacgcagtcgtccatccacgcccccccgcgcttatgttcgcgggcatacaggtcgagatagaagctgccgcgcagctcgttgtgttcgtcatacagctcgaagaagcgcacttccggatgccacacatcgacatcggtacgctctttagcggtaataccgtaaatgcgcttaaccacttcaaacaggccgctaacggctttgttttccgggaaataggggcgcagctgctcatcgctgatgctgtagaggtgctgcttctgtttttcgctgtagtaggcaatgtcccacggctgcagctcatcgacgccaaactcggctttggcgaaggcgcgcagctgggccagctctttttcgccctgcggacgggcgcgttttgccaggtcggtgagaaagtcgagcacctgctgcggatccttcgccattttggtggcgagggatttatacgcatagctgtcaaagcccaacagctgcgccagctcgtgacgcagggcgaggatctccgccatcaccgggctgttatcccatttcccggcgttcgggccctgatcggaggcgcgggtggaataggcgcgatacatctcttcgcgcagcgcctggttatcgcagtaggtcatcaccggcagatagctcggaatatccagggtcagcagatacccttcctgctctttggcctgcgcctgagcctgagcggcggccagcgcgctttccggcatgccggccagatcggcgacatcggtcaccagcttgttccagcccatggtggcgtcgaggacgttgttgctgtactggttgcccagctcagagaggcgcgcggcgatttcaccgtagcgtttctgcgcctccggcggcaggccaatcccggataattcaaaatcgcgcagcgcgttatcaaccgcttttttctgcgcggtattcagcgtggcgtagttatcaccatcgcgcaggtcgcggtaggctttatacaggccttcatgctggccgacccaggtgctgtactcggagagcagcggcagcgtctgttcgtaggcctcacgcagttcagggctgtttttaaccgaattcagatggctgacaggcgagaagatgcgtcccagcacatcgtccacttccgccagcggctggcaaagattttcccagctatacggcgcgccatgcgccaccgcgctttccaccgcggcccggcaatcctccagcgctttggtgaccgcagggaccacgtgctctggtttgatcgcagaaaaaggcggcagggagaaaggcgtcaataatggattggtcatatgcgctgtcctgttgaaaagggtgaatgaagcgcgcgtccggcgcttatgcatgagatctagaatgggggatagttgggggaatttcaatgacgggcggtgcgtcagcctgggtattgctgcgataagtccgcccgttgccggaaaagcgcgacacgcagtgcagcgtgccggaaaccacattaatgccttttttgcgccatctcccaggccgccgacagattcagccgctgccagaattgctgttcgggggtggtgccggatagcgggtaacccgccggcagcgcggtgttgaccatcagcgcccgacgctgggccgctgacagatgcggcagggcatcttccagcagcacttccgccccctccggcacctgtaaacgcggctgcggacccttctgctgcggcagatcgtaggtcatggtgaagcgagagaaatcacgcatcgccggatcgcgccagggatcgtctttcacgctgctcttcgcgcactcggcaagcgatgtgccgcaggccttcgccagcgcggcgcgcagctgatcgcgggcttcgttaaataatacccggtagtgcggatcgttaagatagtgggccacgttgcgctcggccactatccgcgagccgatcacgtccagcgggtagtggacgcccagcacgatgcgcgagtagccatagcgggcgccgcgcgccaccagcgcgtcgtagcgctccgggatcatcgccgccagcagcagcgcatcggtatagccggtgttggtgtggccgctgggaaacgagccgccgtcggcggtgtagggctggttatctttcaccaccacatcgtcaggcaccaggtgaatggtgttgccctgcaccagaaacggccgcggattattgaagtgctttttcgcctcgccggtgctgacctccgaggctttgatcaacgctgccgctttccccagcgcgccctggtcataggcggtcagaaacgctttgccaaggcgtggccccagcgcatcgctgaggaagtagaggtagctaatgccttccgcatcggccagcgcctgacggcgcgtggtctgcacggcgtcgcgattgatggcggtcaccgtcgccagattctgcttcacgacggtctccggcagggtgctgaacgccgacagcagcgcaatgcccgcctgctggttggcccgggtctggaagtcatagccgctggccttcagccaggcggtatcggcctgagtttggttttgtttggtgtgcgccagccgatcgcgggtcagcgtagcggcattcccctgcagagcgtggcgtagctgcgccagcgcctgttgctcaagatcgtcatacgcctggctggaggcagccggcgtcacgctattggcgagggccgccgccctgttcagcgggatgtctttagccagaaccggttgcgccagcagcagcgcgacggccagcagcgagagttgccttttcattatttttccttttattcaaataattaccttgcctgtacccgacgctagcgcggccgtttgacgtttttatgacagcgttatgttttgcaacgcttttggcagaaatgaaacagcgcggcggcgcagcggtaatctcggccgatctgcggtaaactatcggttaacttgtttacttcccggaatctctgcatccatgctcagttatcgccacagctttcacgcaggcaaccacgccgacgtcctcaaacacaccgttcagagcctgatcattgaatcactgaaagagaaagaaaaaccgtttctctacctggacactcacgccggcgcgggccgctatcagctgagcggcgagcacgccgaacgtaccggcgagtatcttgaaggcatcgcccgcatctggcagcaggacgacctgccggcagagctggagccgtatatttcggtcgtcgaacacttcaaccgtaacggccagctgcgctactacccgggctcgccgctgattgcccgccagctgctgcgcgagcaggacagcctgcagatgaccgagctgcacccgagcgacttcccgctgctgcgcgctgaattccagaaagacagccgcgcgcgcgtcgataaagccgatggctaccagcagctgaaagccaagctgccgccggtatcgcgccgcggtttgattctgatcgacccgccgtacgaaattaaaaccgactatcaggcggtggtcaccgggattaacgaaggctacaaacgcttcgccaccggcacctacgccctgtggtacccggtggtgctgcgcgcgcaaatcaaacgcatgatcaaagagttagaagccaccggcattcgcaaaatcctgcagattgagctggcggtgcgtccggacagcgaccagcgcggcatgaccgcctccgggatgatcgtcatcaacccgccgtggaagctggagcagcagatgaataacgtgctgccgtggctgcacagcaaactggttccgaccggcaccggccacgccaccgtcagctggatcgtaccggagtaatcgcaaccatcggtggaaccttttaagcctcgcgctacaatcgcggcaatcaacgattaaggacatatgggcatgagcaaacattatgattacctcgccatcggcggcggcagcggcggtatcgcctcaattaaccgcgcggccatgtacggccagaagtgcgcgctgattgaagccaaagagctgggcggcacctgcgtcaacgtcggctgcgtgccgaaaaaggtgatgtggcatgcggcgcagatccgcgaagcgattcatctttacggcccggactacggtttcgataccaccatcaaccattttgactgggagaagctggtcgccagccgtagcgcctatatcgaccgtattcatacctcttacgacaacgtactgggtaagaataaagtcgacgtgatcaaaggcttcgcgcgctttgtcgatgcccacaccgtggaagtcaacggcgagatcatcaccgctgaccatatcctgatcgccaccggcggccggccgagtcacccggatattccgggcgtcgaatacggtattgattccgacggtttcttcgaactgccggcgctgccgaagcgcgtggcggtggtcggcgcaggctatatcgccggtgagctggcgggggtgattaacggcctcggcgccgaaacccacctgttcgtgcgcaaacacgcgccgctgcgcagtttcgatccgctgatcgttgagaccctggtggaagtgatgaacgccgaaggcccgcagctgcataccaatgcgatcccgaaagcggtggtgaagaatgccgacggcagcctgacgctggagctggaagatggccgcagccagaccgttgactgcctgatctgggcgattggccgcgaaccggcgaccgacaacttcaatctggcggcaacgggcgttaaaaccaacgataaagggtacatcatcgttgataaattccagaacaccaacgtgccgggcatctacgcggtgggcgataataccggcgccgttgagctgacgccggtcgccgtggccgcaggccgtcgtctctccgaacgcctgtttaacaacaaaccggaagagcatctggactacagcaacatcccgaccgtggtcttcagccatccgccaatcggcaccgtcggcttaaccgagccgcaggcgcgcgagcagtacggcgacgacgccgtgaaggtctacaaatcttccttcaccgcgatgtataccgccgtgacctctcaccgtcagccgtgccgcatgaagctggtgtgcgtcggcccggaagagaagattgtcggcatccacggcatcggcttcgggatggatgagatgctgcagggctttgcggtggccctgaagatgggcgccaccaaaaaagacttcgacaacaccgtcgccattcacccgacggcggcagaagagttcgtcaccatgcgctaagacgcgatcgccggatgataaaaagaagcccctgggggcttctttttttatgctcaggccacgccgttattgccatggcgcataaacgccgggcgctgattgagcgccatataccagcgctccacggctggcatctccggatgggcgaaaggggtcattttccagcgatgcaccgacagccccagcacgatatcggccagggtgaagcgctcgccggctatccacgccccggtacgctgcagctgcgcttcaacaatgcgcacgcagtgggtccaggcggcaatactctctttaatcgccaccggatcctgaaagcgcggatctttacgcaccagccccataaaagcatggcgccaggcagtattgaactcggtcgcctgccagtccatccagtgctccacctcggcggcgggctgcggttcggcgggcagcagatcccagcgctccgctttgcgcgccagatagcggcagatactgttcgactcccagagcacgaagtcatcgtccagtagcaccggcaccaggctgttaggattcagacgctgaaactcaggcgtatccaggggcttaaatccgctgccgtaatcttcctgctggtacgccagcccggcttcctcgcaggtccacagcactttccgtacattaattgaagagcgtttacccagaatttttagcatcgtcagcgattcctcagccataaaagacagttcattcactctactctattgccagccagcaacaaggcagagcgctggataatgtgtatagttgattccagcctgtttgccgaaaaggaacccgacatgttgaccccttttaccgttttgatgcctgcaaatattcgttttggccgtggtcaggccgagagcgccgccccctggctggcgcaacagggcggcccaatcctgctggtgcatggcgccagcccgcagcgggctgcgtttctccgccagcagctggaggcgctgcagcttgcggtcacgacgctggcgataagtcgcgaaccctggcttagcgatatcgagcagggcgtccagctggcgcgcgagaaagggatcagagcggtggtcagcctcggcggcggcgcggtgattgacgccggtaaggcgattgcggcgctggtccccgccgccggcccggtgatcgactatctggaggtggtgggaacgggccgtcagctggaagtcagtcccctgccgttcgtggcgatccccaccaccgctggcacgggcgcggaggtcaccaaaaatgcggtgatcaacgttccggaacagcagcggaaagtgagcctgcgcgacgaccgaatgctgcctgacctggcgattgtcgacccggcgctaaccgacaacgcgccgcggagcatcaccctgagctccggcctcgacgccctgacccaggtgatcgagccctggctctgcagccgggccactcccttcaccgatgctctctgccagcaggcgatcccgcggggaattcgcgcgctaaaaatcctgatggaacaagagtgtccggccagccgcgacgagatggcctgggtcagcctgggcggcggactggcgctggcgaacgccgggctgggggtgatccacggcctcgccggcccgctgggcggcctgagccgcgcctcgcacggcgccctatgcggcagtttgttgccgtttggcctggcgctcaatgagtcgcagatcaacgaccctggcctgcgccagcgcgttaacgatgtccgccgctggctggccgacgggctggacgtccctgtggatcaggtctgggacagtctgcgggaatggagccatcgcgctggccttggcaccctgcgcgacctcggcgtagcgcgcgatgcgctggaaccggcggcgctggccgccagcacctcctcatcgatgaaggccaacccggtcagcctgagcggcgaacagctgctggagatgctggaggcggcgtgggagtgagcgtcccgggataaaattttgttgcataatgaatgctccgaatttcatctgcgccaggatctacaatttttaattacttatcaacagcatactttgaaatggcagcttttcttctcggcggaaaagcgtgatctcacgcacagtttgcttcacactcaccgaagcgactgtctacgcttaatagacaaggccgggtatgcccggccccgaactcacgctatccggaggtccgtatcgctatgttcagccagaaattacgccacgttgaagacgacgagttaaggatcgacatcgatccctgctacgaagccgatccgtacgaattaaagctggatgagatgatagacgctgaaccggagcctgaggtgatcgaggggcttccggcgtccgatgccctcaccccggcggatcgctatcttgagctgtttaccaacgtgcagaaatcacgcattttcgcggacagcaaaaccttccccgactgcgcgccgaaacacgatccgctggacatcctgcggaactaccgcaaggtcaaacgccagcccgacttcgatctgcggcagttcgttgaggacaacttctggctgccggagagccagagcgacatctatatctccgaccccagcctgaccctgaaagaacacatcgacaagctgtggccggtgctgacccgcgagcctcaggatcatatcccgtggtcatcgctactggcgctgccgcaggcctacatcgtgcccggcggtcgctttagcgaaacctattactgggactcttatttcaccatgctggggctggcggagagcggccgggaagatttgctgaaatgcatggccgataactttgcctggctgattgaaacctacggccacattccgaacggcaaccgcacctactacctcagccgctcgcagccgccggtgttcgccctgatggtcgaactctttgaagaggatggcgtgcgcggcgcgaagcgctatctggaccatctgaagatggagcacgccttctggatggacggcgccgagtcgttgatcccgcaccaggcgtatcgccacgtggtgcgtatgccggatggctccctgctcaatcgctactgggacgaccgtgacacgccgcgggatgagtcgtggcgcgaagacgtggagaccgcccgacactccgggcggcccgccaatgaagtataccgcgacctgcgggcgggcgccgcgtccggctgggactactccagccgctggctgcgggatatcacgcggctggccagcatccgcacgacgcagtttatccccatcgacctgaacgccttcctgttcaagctggagacgaccattgccaacctctccggcctgaagggcgatcgcgagacggagacggccttccgccagaaggcccaggatcggcgggcggcggtcaaccgctatctgtgggatgatgagaacggctgtttccgcgattatgactggcgccgtgaacagctggcgctgttttccgcagccagtatcgtcaccctttacgtcggcctggcgacccacgaacaggcagaacgccttgccgatgcggtgcgggcccgcctgctcacccccggggggatcatggccaccgaatacgaaagcggtgagcagtgggataaacccaacggctgggcgccgctgcagtggatggcgatccagggatttaaacgttacggccaggatccgctgggagatgagattgcctggagctggctgcagacggtcaaccacttttacaagcagcatcacaagctgattgaaaaataccatattgccaccggcgtcccccatgagggcggcggcggggagtatcccctgcaggatggctttggctggaccaacggcgtggtgcgccgactgattggcctgtacggtgagccaacctagtcgggctgttcccggcggctttctcctgctatgttcagaggattcgccctgcccggaacgacgcttatgcctgaacttctgacgccgcgcctgcgctgctcaccgctgcagctggacgactggtcgttttttctttccctgcagcaggatccgcaggtcatgctctacgtcgccgatccccgaccgcaggcggccatccgcgaggcgttcgattcgcggctgccgccgtggacgcccggggatgaacactggctgtgcctggtggtgcgcgacaggctgacccataccccgctcggcctgaccggttaccagcatcatcagcgcgacattgccgaggttggctttctcttcgccccggcggcgcagggtcggggctacggctacgaatcgctgcgcgcgctgtgcgactacgcctttaccaccggcggcgtccgccgcctgaccgccagcgtcaccgccggcaacgagacgtctaagcagttactgctcaaagccggcttccggctggagggggagctgcgggaaaactactggctcaacggacgctggcacaacgactggctgttcggtcggctgcgtggggagggcgatgcgccgtagcgcaccgccggtcacaggctgggggcagtcaggatcagaggaacatcccgcccgagacttccacacgctgcgcgttcatccacgccagctcatcgctgagcagggcggcgatggcgtcgccgatatcatccggcagcccaacgcgccccagcgcagtctgggcggcgatatgccgattcacctcggcgttatcgcgcacctccccgccgccaaagtcggtctcaatggcccccggcgcgatgatgttcaccgatatcccccgtccgcccagctctttcgcctgatagcgggtcagaacctccatcgcccccttcatcgcggcgtaggccgcatagcccggcagggcaaagcgcgccaggccgctggagacattgaggatacgccccccatcctgcaggagaggcagcagacgctgggtcaggaaaaacggccctttgaactggatattcatcagctcgtcaaactgcgcttcgctggtctcggcgaagggcgcgttgagtccgatcccggcattgttcagtaaataatcaaaggtagtgcgtccccacttctgcgccagcacctgcgccacctcgctggcgaatgcgtcgaatgttgtggaatcgccgacgttcagcgctaatgctgccgctttgaccccttttttctctatttccgccaccacgtcgagggccgcctggcggttgctgtgataggtcaaaagaatatcggttccctttgccgccagcttcaacgcggcgtttttacccagaccgcggctgccgccggtcactaaagcgatacgttgtgtcatcagaagacccctttcaggttgcgttgtgattgtgttgtagcttattaactgctcatgcaacaataaatacgctacattgcgttttactgtttcattaacaacaacaataggcgatcggcatggataaaattcatgcaatgcagttattcattcgcgtagcggatctggagagcttctcccgcgccgccgagaccctggcgctacctaagggtagcgtctcgcgacagattcaggccctggaaagccatcttggcgtgcggctcctgcaccgcaccacccgccgggtccagctcacccaggatgggatggtctactacgagcgggcgaaagatctgctgagcaacctcgacgaactggacggcatgttccagcacgatccggcgagcatcagcggccggctgcgggtggatatgccggtcggttttgctaaaaaaatggtgatcccgcatctgccgacttttttacagcagtatccgggcatcgaactggagctgagcagcagcgatcggctggtggacgtgatccgcgaggggtttgactgcgtggtgcgcgtcggcgcgctcaaagactcagggctgattgcccgcccgctgggcaagctgacgcaaattaactgcgccagcccggactacctggcgcgttttggctatccgcaatccctggaggatctggcggatcatgccctgatccactacgccagcaccctcggggtccgtccccccggctttgaggtaatgatcgacggcgcggtgcgctgggtaaaaaccggcggcatattgacggtcaacagtacggaaacctatcaggcagcctgtatcgccgggctggggattattcaggtgccacgcaccggcgtgcgcgaggcgttacgcgccggcgacctgattgagatcctgccccagtaccgcgccgagccgctaccggtctcgctgatctatccgcaccggcgcaatctctcccgccgggtaaatctgtttatggagtggctgggcggactgatgaaagcgtatgtcgattgagcggcgcggctgaaaaacgggcggtggagagaggcattcctgcaggatacggcatttaaggtatactttttgctgaatctcgctgtaaaaaaggaagaaattacgtatgacgccggaaaacgacgatcgacgcccgccacaggaaccggatacgcagccggagaaaagcaaaagcacgctcgaggccctcaatgacaccgcagtcgggcaaaaagccagccaggcgctgaagaccgtcaccggaacggcggccaaagtgcagcgcaacccggtgatcgcccatctgttgcgcgccgcagagcgcttcaatgaccggctcggcaatcagtttggggcggctatcacctatttctcgttcctgtcgatgatcccaatcctgatggtctcctttgccgccgccggcttcgtgctggcctggcacccaaccctgctgcaggacattttcgacaaaattctgcaaaacgtcagcgacccaccgctggcggcaacgttgaaaaacaccatcaacaccgcggtgcaacagcgcaccgccgtcggtctggtcggcctgctggtcgccctctattccggtattaactggatgggcaacctgcgcgaagcgatccgcgctcaatcgcgcgacgtctgggagcgccggccgcaggacgaggagaaaatctgggtaaagtacttccgcgatcttatctcgctgatcggtctgctggtggcgctgattattacgctgtccatcacctccgtcgccggctccgcccagcagatgattatctccgcgctgtatctcgacaacattgaatggctgaaacccgcctggcggctaatcggcctcgccatctcgatttttgccaactatctgctctttttctggattttctggcgcctgccgcgccatcgtccgcggcgcaaggccctgtttcgcggcacgcttatcgcggcgattggctttgaaatcataaaaatcgtcatgacctggacgctgccggcgctggtgaaatccccctccggggcggcgttcggatcggtgctggggctgatggcctttttctatttcttcgcccgcctgacgctattctgcgccgcatggatcgccaccgcggagtataaagacgaccggcggatgccgggcaaaacccaccgctgaggtattgcgaggatgaataaaagaggcaaaattcatcctcgcgcttgatttcagcagataaatccagcatgtaacttttatttaactcaaaactggttttattctctatctttttaattgcgtgaagcatttcatagaactatttttactggtgtaaaaattatccgctttttgcctcttttttgcccattttccgcgtttgttacagattgaaatgtccctgtggctgtggctatatggcttttcgttcgcgcaaaaataagaaagatctatgcaagccacagccaccactctcgaaaacacgcaggaaaccgccccggtcaactcacgcaacaaggttgttgtcgcctcgctcattggcaccgccattgagtttttcgacttctacatctatgccaccgccgcggtcatcgtcttcccgcatatctttttcccgcagggcgatgccgctgcggccaccctgcagtcgctggccaccttcgccatcgccttcgtcgcccggccgatcggctccgcgctgtttggccacttcggcgatcgcgtcggccggaaggtcaccctcgtggcctcgctgttaaccatggggatctccaccgtggtgatcggcctgctgcccggctatgaaagcattggcattgtcgcgccgatgctgctggcgctggcgcgtttcgggcagggccttggcctcggcggggaatggggcggcgcagcgctgctggctacggaaaacgccccggcgcgcaagcgcgccctgtacggctccttcccacagctgggcgcgccgatcggcttcttcttcgccaacggcaccttcctgctgctctcctggctgctgaccgaccagcagtttatggagtggggctggcgcgtgccgtttatcttctccgcggtgctggtgatcatcggtctgtatgttcgcgtctcgctgcatgagaccccggtcttcgccaaagtagcggcggcgaaaaaacaggtcaaaatcccgctgggtaccctgttgaccaaacacgtccgggtaacggtgctgggcaccttcatcatgctggccacctataccctgttctacatcatgaccgtctactcgatgaccttcagcaccggcgcggcgccgaatggcctgggtctgccgcgtaacgaagtgctgtggatgctgatgatggcggtgattggctttggcgtaatggtgcctgtcgccggcctgctggcggacgcttttggtcgtcgcaagagcatgattatcatcaccacgatgattattttgttcgccctgttcgcctttaaaccgctgctgggctccggcaatccgctgctggtcttcgccttcctgctgctgggcttaagcctgatgggactgacctttggcccgatgggcgcgctgctcccggagctgttcccgacggaagtgcgctacaccggcgcgtcgttctcctataacgtgtcgtcgatcctcggcgcttcggtcgcgccgtacattgccgcctggctgcagggtaactacggtctcgcggcggtcggcacctatctggcggcgatggcggcgctgacgctgatcgccctgctgctgacccacgagacccgccaccagtcgttgtgatccttcgccctgacgcccccggcgtcagggctctcctctactttttcatctgcgacaaaatggtccgacactggttgctatcgccctccgccggggagatcagcgccagcagcgcggcggccggcgtcaccagggttgccagcgccgccgctaccgcgccgcggacaatcagcggcccggccttcacccccgcctgcggcgatttaaaggtgccccggacatacagcggggaacgcagggtgatcacccgaaagcctttgctttccggatcgatggtcaggtccagctgctcggaggcgaagctggcggtcccggtcacattgatcagcgcgttttctgtatcgaaggcaaaaatctgcggccgggcgacgccattggttacgtcgatattggccgcggcgcagtttacccgaacctcctcatcgccaaaaatctggccgatcaggtagttaccgacgttaagaccgaggatttccatcaggttgcgactgatcagtccgtcgttcatcagcagcttcaggttaccgttgctgttgccgagcagggccgccaccgagttgccgctgccgcgcagctggacgtcgccattcatctcgccgagggttttctgcatcatctcgacgtttggcatcagcgccttcagcttcaggcgtcgcgcctgcagattggcctcaccctgcagcggctttttatcgccctgcaggtgtacgctgccggcaatcgacccgttggccaggccaaagcgcaccggctgcaggcgcaggtcaccatcctccagaatcacatgggtcgacagatcgctgatcggcagggtgccgccgtgctcaattctccggcccttaaagcgcacatcggcatccatcacctgccacttgtcggtttcaaagcggtccgccggcagcactttacccgccggctgcggccggtcccccgcctggcgcgaagcgcttttcttcgtccctttgccggaatcgacgccgattaatggcccgaggtccgccagacgcagctgcttcgactccatatcgccgctgagtttcggccgcggcttgccggtggtgtaggtcagggagccatgaatgtcgctatcgccgattcggccgttaaaattctgatagttaaagcgcatgcggtttttttgcgtaaagtcggcgcgcaggcggccgtcggtggagaatgacggcgtctccggcagcagcacgccggtcaggtcatagagatcgcgcagcgagtcgccggcgaattttagccgcaggtcaatgccgccgacgttgagcgggtcgctgaccgtgccgctgaacgctacccgggtgttaccggagtggaagtcgccctgcaatgggaagggggcgcttgcgctgcgcagggccagcatgccgccgattttcccgttgccggtgaccggctggcccttgtagcggcccttcagcgacagaccaaagacatagtcgcctggtttcgccgcgctatggctatcttttgtgccggtcacttcgctgaacggcagcggtttgccgaggggatcgacgaggatggtgatatcgctgcgggtgatcttgtcgtcaatggcgatagtcccgcgatcaaagagaatattatcgaggcgaaaggaccagctggagggcgcgctgtcgcccgaagtacgcttatcgcccgccagctgaaaggtccagttattgttgtcttccgccaggcggatcaaccgtacgtcgggctgctccagcttgatccacggcaggtacaccgttttgctcagcagcgccagcggggcaagggtcgcctccacccgcggcaaatggatcatggtcacctggggaatggccggcgggttgcccagcacgatatcctccgcgtgtacgtggggccacgggatccagctgcgccagccgcgctcgtccggctgccgctcccagaccacgccgagatcgccgcggatggcgaacgggcggttaagttcggcggacactttctgattgatcgtcggcttcagccggttccagtcaaaggtggccagcacgataaagaaaagaacgatcagcaatagtatcgttcctgtgatgataaccaacgttttacgggttctgctcatccctactccgctccttttgcatcacgtcagtcctgaatatagtcaaaaagcggcgtttatcctggaaatgcgcttttcgtcacattacgcgcgtcaggtcaaaaaaataatggaacgatgttttaatatgattgaccagcaaaacagcgcagcgcacactagcgcttatatcaattccattgcaggttctggctatgtctaaaaaaattgccgttattggcgaatgcatgattgagctgtcagagaaaaacggggccgttaaccgcggctttggcggcgataccttaaacacctcggtctatatcgcgcggcagacggatgccagcgcattgagcgtccactacgtcaccgccctgggaaccgatgcgttcagccagcagatgctcgacagctggcaacaggaaaacgtcaacaccgatcttatccagcggatggccgaccgcctgccggggttgtattacattgaaaccgatgacaccggcgagcgcaccttctactactggcgcaacgaggcggcggcaaagttctggctggagagcgatcgcgcggcggcgatttgcgaagagctggccactttcgactatctctatctgagcggcatcagtctcgccattctcagcccggccagccgcgacaagctgttcacgctgctgcgtgagtgccgcgccaacggtggcaaggtgatcttcgacaacaactatcgtccgcgcctgtgggccagccaggcggaaacgcagcaggtctatcaggagatgctcgcctgcaccgatatcgcgtttctgaccctcgatgatgaagacgcgctgtggggagaaaaaccggttgctgaggtgatcgcccgcacccacgccgccggcgtggaagaggtggtggtgaagcgcggcgcggatgcctgcctggtctcggttagcgggcaaccgctgcgggaagtgccggccgtcaggctggccaaagagaaggtggtggataccaccgccgccggagactccttcagcgccggctacctggcagttcgcctgaccggcggcgatgccgaatccgccgccagacgcggacacctgaccgccagcacggtgatccagtatcgcggggcgatcatcccgcgggaagcgatgccgcagtaattctccgcacaaagcgctctccggccgccgctggcgcgccggagaggcgttaggttactgccccggcgggatgtcgctggcctcgctgtgggcgtcaaccgtatcggcgctgccgctagccgccgtggccgccggattcggcgccatcagtttttcccaggtggcctgcagttccttcatattgtattccggttcgcccttcggctgttgcagcaccagcgccatgtcctgcgagagctgctggcgcagatactggttcagcatgtccaccgtcagggagttgaggaactcctgacgcagcttctggtactgctccggcgcgatgtccaccacctgattctgcagggagcgcatgcgctggctcatcagaatgtcggtgtcagtgcgcgcataggtggcaaacagcttctgcagctcgaggcttttctgagcgataagcgcgtcaaactcctcctgaggcagcccgttgtcccgcactttcgccagctcgcgcgaaaccacgctcaggttgttgttcaggcgctcgcccggggaatcgatgttgatggcgcactgcgcgcgctgatatagcacccggcagtcaaagccaaggccaatatccttcacgttatttttgctcagactctgctgcacgtgccagaacagcgcttcacgggcgagatcgtcacgccagtagcgctgcagcgccgcggagtcgcggatcggctgccatggcgcatcccacatgatggacagtttgtcctgacgcaccgcgttggtcatgatgctgaccggcacggtaggcagcggcgataaggtcggcaccgctgcgggggtttcccgcttgcccttcagatcgccaaaggtcttattgatttgctcggcaacgctgcggctgtcgacattccccaccacgatcagcgtcatggcgtcgggggtgtaccatttttgataaaagtctttcagctgcgccacgtcgatcggctgcttcagcggcgcggcggggtcatggcccagcatggtggaccctttcaggcgatagcgccaccaaccctctttggtatccagtggccaggtcgccaccatgtcgctgccctgcagcgcatgattgatcgattcaggcgtaatggccagtttaccgctggcgtccgccagccagctcagcgcctctttcaatagatcgttgcggttattgggcaggctgagattaaacatcgtgtaatcgtaggagacgatggccggcggcagaggacgcttcgggtcaatactctgctgccataaagagcgcgcctgcatcgtcggcaggctgccgctttgcgtcaacgccaggcggggaataaagcggctgaaaccgctctgctgagtgctttcgctcagcgagccattattgacggacaaacggacttcgatacggtcgctgggacgttgcggcgtggccaatacctgccacgacaaaccattcgctaaggtcccttgttgccaggccggatcaggctggagcgcttctgcctgcacataaccggccgccgctaccatcagcaaaccgcccgttaagagtttaattgttgtgccctgcatgtgaacccctgatgaacattcctggttacaacagcaccccactgacgggctgccgaaaaaagtgagagtgaaatacgtcggttagaccacacggagacgaaaatgtcgcatgacaacgtaaaataatcatttcgtgtcattcccgccgggcgggaatgacctctaattatgcgcaggaggccgtactccagcaagggagtacgggcctaagaggaggatttaagaggataattcgtgcgttttgttcgccggaacacggttattcagaacgtcatccatctgtttggcatccagttctttcacccatttcgccaccaccaccgtggcaacgccgttacccaccaggttagtcagcgcgcgggcttcggacataaagcggtcgataccgaggatcagcgccaggccagccaccggtaaatgcccgacggccgagatggtcgccgccagcacgatgaagccgctgccggtcacccctgccgcccctttcgaggagagcaacagcaccaccagcagggtgatctgatggaaaatatccatatggctgttggtcgcctgggcgataaagactgcggccatcgtcagatagatagaggtgccatcgaggttgaacgaatagccggtcgggatcaccaggcccaccaccgatttacggcagcccagcttctccatcttgtcgagcattctcggcagcgccgattctgatgaggaggtccccagcacaatcagcagctcttcccggatatagcggataaatttgaagatgctgaagccggtggcccgggcgatgctccccagcaccaccaccacgaacaggatacaagtgatatagaagcagataatcagctgccccagctgcaccagggtgccgacgccatatttaccgatggtaaaggccatggctccgaaggcgccgatcggcgccaggcgcatgatcatattgataatgccgaagataacctgggagaagctttcaatgacgttgaaaatcagctggcccttgctgcccagacggtgcagggcaaaaccaaacaggacggcgaacagcagaacctgcagaatgttgccgctggcgaaggcgccaatgacgctgcccgggatcacatccagtaaaaaggccactaccccttgatctttagcctgctcagcgtacaccgccaccgctttcgcatcgagcgtcgacgggtcgacgttcatcccggcgcccggctgcaccacgttgacgataatcagaccgataatcagcgcgatggtgctgaccacttcgaaatagagcaacgccaccgccccggtacggccaacggctttcatgctttccatcccggcgatccccgtcacgacggtacagaagatcaccggagcaatcaccattttaatcagcttaacgaaggcgtcgccgaagggtttcatttgcgcgcccagttccgggtaaaaatggcccagcagaataccgatcgctatggccgtcagaacctggacatagaggcttttaaagatagaggttttcatagggtgtcctttgggaataaccacagagcaagaagggatatttgacgtctgtggcttaaaaataacaccctggaaacatttcagaaataactaacgccgaaagtgcaacgcaattgttaaaatctttgagctgactcgcacaagtcaacaaaacatttacaaatttgcatcctcccgggccggggagagatagcgcgcgctgaatgcctcctgcggtaaagcgcaaccgaacagatggccctggagcacctcgacgccagcggcttgcaaccagcggcgctgggcgtcgttctccaccccttccgccacgatacgcagcgacaggccgcgcgcgagctggatcatcgccggcaccatgctgacatcctccggcagcatatcgatgaataccttatcaattttcagaatatccaccggcagggccttcatctgctgtagctggtgcaacccggcataacccatgccaaaatcatccagcgcaatctgcaccccggcctcgcgcagcgggcgcaaccgggccatcacatcctgcggatcgtccatccggcagctctccgtcacctcgaggatgagggtacccggggcgatgcggtagcgggcgatcagcttcagcatctcctcgccgcggtcatgctccagcagctggagcagcgaaacattgaccgacagcggcagcataatcccctggctttgccaggccgccagctggcggcaggcctcttccattacccagtagccgaccgggataatcagcccgcaggactcaatgcgctcaatcagcgacggcggtagcgaccagctgccatccgcctgccgctggcgcagcagtacctcggcgccgcagatctcgccgctggcgcaggccacctgcggctgcagccagatcgcgaactgctggttatcgagcgcggtcataatgtcgtgctcttccatcaggcggcgctgagccttttccatctgctcgggatcgaagaactcgatctggtttttgcctttacgtcgtgcggtgacggcggccgacaccgcgcgccggtaaaactgctcggcgctgagcccggcgtggaacatggctatcccgacgctggcgtaggggcgcagctgcagcccatgcagcggtaaacgctcattaataatagtgagcacttgcttacttaacgttaccgcctgccacggttcagcgaggccatcggcgagaatcgcgaagtcatacccgctcacctgagccagcaccatctgcggcgggatcgcggcccgcagcttctccaccagcgtcaggagcagcatttcgcgctgactctccttgaggactccggcggcgtcctgcagggtttcacaggcgacgacgatcagcgcggcgctctgcgggcgggccaccgtctgctccagcatcgccagcaaaaaggctttattcggcagctcggagaccgggaagcgggtcgactggatggacagctcatcatgctggcggaccaggctctgctggttgcggttatagctacgcaccagcataccgatctcgtcgtcatggtgcaggcgcggcagggtcagctgatggccaagacgctcctgctgggagagatcgttcagctcgcgggcgatacgccgcagagggcgaaccatcagccggttgatgcaccaggtgagcgccaccgtcagcatcagcaccagaagtaagtaagcagtcactaacgtagcaagggcgctcatgacgaatttatacatgcgataggagtcggcctgcagcaccagataggccagcggctgcgggttggccggccgctccagcgaataaatgggcagcgaaatctgcaccggcagctcaaacagccgggtgacggttaccggcaccggccgctcggggataaatcgcatccgcagcgcctggaactggttcggcaataccacatccgcccggctgacgatgccagcaggctggatacggcttaaaatggcttccgcttccggaatatcggctttcagaatagccgcagacagcggttcgcgaacggatcgcgcgatactttctaactgcgtggccgtggtaaagcgactctgttgcacaaagtgaaacagcaaaatagtgcaaaaaaccaatacaaaggccatggacacgctcgcgaccatcgccatctgtttgattgtaagtgaacggctgacgcgcaacggtgttctccactgatactgaatacatacccggtatcaatccttcaatcccggtcgtttcaggctgattatatacttaaatccttcgcccacgcccgcgagggatgaagtgacgggatatttccgcgcggtggcgcggacgccgggatacatccccgacggccaacggtgggcaacgcctcacgagtatacgcgaagcgcgtcgcggagtggcgctctgtaacgtaattcagcctattctgctaccagtcggcgtagggcaccagcggctggggcggcatatccagatccccctgccagccggccgccgagtagcggacgtaaagcagcgcatggctcggggtgtaatccttcgcctgctgaatatcgaccgcggcgccgacgaaccagttgctggtcacccgccgctccaccagcgctctggcggtgtaaccgaatccatggctgctgctcccctcctccgtcagctcgctggcgcgctgccggtagtcggacgggatcaggttcagcagcggatagcgggcttgcgtctgggtgcgcgaatgggaccatgacaccgacccgccgagctcccaggaccagttctcggtgcgctgacgccaggtcaccggcacggcgaacgagagatactcctgtgggctgtaatagccgccctggccgagggtgtagccgctgagatctttgtcgtagtgccagatcatattgttgaggccgacggtgacgcgacgattattctcgttgatgaccttgtagtagtacccggtcatccagcgcacgcgccagttatccgccacgtttttaccggtcagcgagtcggcgcccagcgaggaccagatgccgtgagcctccccgcgatcgtagctcaggctcaggccgccgccgtcggcgcggacgccgccccaggtggcgccggtatggctgctgctgtccttctgcccgccaaaggagagcagcgagctggagataggccgccggtggacgttgaccgtgtaccccaccggcccgacgtcgctgctgtagctcagcccccccaccacatcgacgacattgaagcccatcggcgtggtgccgatatccccgctccaggtgtcattcttccagccgaccgccacgctggccccgctgtcggtctgatttttactgccgctggtacaggcgatctccccgcaggtgccccagctgggcgagtagctcccgtcgctgtgggtggaaaaactgccggcatccatattgaccagatcggttcgaaagaacatccggccatccgccagcggagcatccacctgcagcatggtggtatgcgccttcaggtcggaatagccgccggtgccgctggaaccccagaagtcatgttccagggtgacgttcagatcctgctgacgataaaggtcggcggcatcgctgcggatcccgcgcttcagccagtcatcatggctgtcgttgcgcgtcagccgcgtaaaagtatcgttatcctgcggctgcgcgggggtaatgccggaggccaccatcgcttcccggtagtgcgtcagcgcctgctgcggcgccccgctctgggtggcaaagcgcgcggcatcgcgcagcaccagcgcgctctccatcgagggcggctgcgccttcgcctgcggcacaatctgattaaaaatccgttgcgcgtcagcggtatcgccaaggccagctcgcgccagcgccacccgccgctgcatgttcatggattcggtctctgcgcctttcagctgcatgacctgcgcccgggcggccggtttatcgccctcggccaggtagacttccgcaaggccgaggcgcgcatcgccgttgtcggcctcctgacgcagcacccgctgatagtcggcaatcgccgtctggctgtctccgcgctgctgcgcccagtcggccagcgtcagatcatagcgcaccgaggcgggctgccgtttgatgagggcgatcgcctgggcttcgttaccgctgtcgcgcagctggttggcctggcgcagcacccggtcgctttgcaggcgcgcttcgagttcacgaatgttatccgtccacgcgctgcgcggcagagcggcgatttgcgccagagccagatcgtcctggtcgttccccgacaggtagagtcccgaggcgtagacccgttcggcgtcctgcggctggcggttgaccatcgtccgcatcagcgcgtcggcctcctggcgttcgccggcgctgaccagatcccgcgccagacggtaggttatccagacgctgtccggatccagcgccaggcgccgacgctgaacttccgccgcctgcgcccagttgccctggctctccagagcctgcgcctgtttctccagccggtcgttagtcaggctgcgctcaatatcatcgatactccgccgctgagcgggagggaggccggcgatccaggcgctggcttcctccggcgattcggcgcgatagaggttggccaggccgcgcaccgccaggttattgccgcgatccaggcgcaacgcctgctggtaatagcgctccgccgccgccgcctctttgcgcgccgccgcgacgtcccccagccccagcacggcatagctgtcggtgcgatcgacccgctgcgcctgggcataatagttctgcgcctgcgaaagctggccggctttcagggcgttatccccctgctttatcagcagccagtagcggttagtttgcagcaggctgtcccacttgccgcggttcgggctgtcagggtccatggcaatcgctttactgagctgcgccactgcccgcgcgcggtcgccgcgctgggaataggcctggccgagagcgcccaccgcgtcgctgtcgcggctgtcggcctgaacggctttctgcagatccgcgaccgcctgcgtggtattcccggacctgaccgccgccagcccttccgagcgggcgcggaaagtcggatcctgcagctgcgcctgctgttggtcgagcagaacgcgggcgttcgccgccaccgagccggtgggaaactgcagaagaaattgctgcaacgcctgcacgctggccttgctcaccggcatgcttttcacctcactgaaccacatatcggcggcgataccgcgtcccgaggccgatcgggccatctccgccagataggcgaacccctcctgcggtttgttatcggcgaacatctgcttcgccagcgaagtcagcaggctgacgttgcccggcgcgctggcgttcagttttttcaactggctgacgccttcgctatggcgggacggcaggcgcgccaccagcgtccagtattcaatggcgacgtcaacgtcatccggcaccccgccgtacagtttttcataggcggcgatggcttcatcgaccttcccggccacgcccagcagtcgcgcctgctgcagcgcctggcggccctcgccggtgttgcttttcatctcattgcgcgacgccttcagctccggggagtccggcgccagcttcgtcagtcgttccagctctttttgcgccccggcggcatccccctgacgcagcagatagcgcatccgcgcggcaatcagctccgggttgttgggatcaatcagctccagacggtacagcgactggcgcaccaggtcttcacgattgctggcctcgccgaggcggacctgctccagcagatgctcctgggcaggcgtcgtcgccgcctgcgctaacggcagcagcgcaacgccgagggacagcgtgagtaaacttagtgagagcttgcgcattcctggttccagtcaggttgtaattcaccactcgccgtgaaacgaaaacggtgttgatcccaaccctggccgaacagcgtcagaactgcgctgtagtaggcatccgcgccgggatagttatcggcgacgcgctggcgttgcaccgaccgggcctcgtcgtcctgtaaaaacggcagcattgccgcggagaagcccactggcccctgaccgctggttttgccggtggcgatattcactttctccgggggtaccccctgcttcgtggtctgcgccgccatcggcgtgaagcgttgcagcagacgcgctttctgcttatcgccatcatggagcatgcccacccacaggtagacgcgaatcgcgtcatagctgccgatcggcggcttttcggttttcagctgccagcctttccctttctcatagcgcacccagtccggggtaaagcctttcggcgcggtctccagcagcaggcgcaggttactatcgcgcagagcgggccacggcgcgccaaaacgcacaaagtaggtggccagctgcggcggaagatagctggggttaaaccgccagccgctgtcatcggcaaaaccgacttttcccggcagcagcatcgtgccgaggcccggcaccgccaccgtctcttcagcgacaatccgcgccagcagggcttttccggtctcggtgtactgcggctgttgccacaggcgccccgcctccagcagcgcccaggctatccacagatccgagtcggacgccgagttgctgtccagcagggtccactgctcatcgtcctttttgccccacagccagcccggcaaatgttgtttcagatcgccttccgccaggttgttctgcgtccaggtcagcagtttgtcgaaccccgcgcgatcgttggccgccagggcgaaaaacaggccatagctctgcccttcggaggtggagattttgcgcgcatcgctggggtcaatcacccgtccctcggggctgacgtacgcttgtttaaactgctcccaggcgggccactggcaggcggcgcccacctggcccgccgccagcagcagcgccgagagcaccgcgccacaaagtactttcatcatggtttactcatcatccaggctaagacggcggcggctgatgatgcgcagcatgcgccacagcacccatgccagcagcacaatgctgatggcggcgaagatcgccagcagtatcgggtggttagagagcgcgaaccagatgcgctcgaaccagggcagatgacccacgtagtaaatatcccccacccgcagactgttgacgccggattcgcggatcaccgccaccgagccaaacatcgctgcccgcttaccgctgtcgttgagggcgttggtcagcagttcattaccgcgcgggctgtcggccagcagggccaccacgctgcgctgatcgttatacggcgactggaagccaatcaccgtcgccatcggcccggaagaggtaatgtcggtgcgggtattgggcgtgcgggcctcatcgtcgggataaatgctcgccaggtcatagtggcgcatcggcattttcacccagcttttggtcgcctcgaccagcaggttgattttggtgtcgtccttgagcgacgacgggatcgcgccgatcagcagcagatccgcgtctttattcttgatctggttgccatcgtcggtcatctgcagattaatcgccgccagaccggtctgcgagccgatgccccccagcgcctgcagcagcgtcgccacctggccctgggtcggcgccttcggcaccaccaccagcgtgtcggaaaggtccgccatacggctgtaagggaagcccgcattggcgaagacgcgcaggtccggcaaggcgataaagtgataatacttcgagaagtcgatggtcgaatcgtcgccaatcaccacatggttctgcaccggctggaaggtaatacagttgtcgatggagccgccgggcatcgggttcatatactggaagtcaaagcgcagctggttgaccgccccaagacgcagcgcggggatggtgacctccgatttgccgtccagcagcccctgcagcaccggcaggcgcaggatcagtttgttcacgtcctgggagctgttaaggctgaacgactgcaggaactggtcgttgaggctgatatccatccgcgagctgtccttcaccggcggcatggtgtagcggtatttcagatccatatcgatgccgttggcccgcagcagatagagatccggcggcaggttaagcgccacggtgatggcatccggcaccaggccgctggactgcagctgttgctcataggttttcagctcagcgaaggtgaccgagcggtcggtgcgcacccagttcggcgcgtcgtaaggctgacgcggctgcagggttttgatgccgtccacggtgacgctgctgccgcggaacagaatattgccctgagcaatccccttcgccgccagcagcaggtcgttatcatcgcggccgaaaatcaccagcagcttgacgtagggatcgttcgggttgtcgatcatttcgatggtcggcgccttgaccggcggatgatcgcgcaggaagtccggacgcttgtcgttggtggcgaagacaatggcgttacgatccggcagttcattgaaatagaccgggaactgctggccgcgccagccggccttgctgccgaaccaggaggcgactatcgccgccgcctgctgctgggtgaccgctggcgagcccgggaaaatcatcggcagcttcagcggacggttatcgcgcggatcgtagaacggcaccgggaagtgtgacagatcgttatttaccttcagcgactggtaggtgagatccagatagctttcgcgtccgacgtccagccacagcgtactgctggccgggttttcgcagacgtcgcggtagtggccgacaaactccagccgtacgcggttgaagtcggtgatgtacagcgggtcaatcggcagctgcgcgcggatctttttccccagctgctctttagtgacgggcaggacgcccatcagctcatcgttaagatagaccttcaactgcgactgcacgggcagcagcgagggcgatggggtgtattccagattgagcagcgcgttggcgaccagctcatcgctgcgcatgccgaattcgaccgacgcgtcaggccgtgagccgcgcagcacgatgctgccgggcggcggcgcgatggtggcaaagctcagcttcacctcccgctgcggcacgttctcggccaccgccgccggagcggtcggttcggcgagggtcgccgtcggctcgcccaccacgatcggcgcagccggggtcgcggcctgcggctgaacgccaggggcagcattcgccaccgcggccggcgccgcataagaggccagtggataccagctgcacatgcccaccgctactgcacacatccaggaaagttttcttttcatcgcattatcatcattgttgagccattgccgggtctgcggagagcgtcggcgcggcgcgttcagggcgtcggggtacaaacgacgctatccaggccaccagcgaagtgagcgcgcggaaaaccaccttcaccgacggcggcgaaaactccgccaggtgacgatagccacgaaagcccagcttgaggatatccagcaggctttccatcggcttatcttccgggaagctatcctgccaaagcgcccacgtatcagcgcgggcaaacgtacactgcacaaaatcgatatgctgctggttggttaacggcagcagctggagccccacttcgctgccgttgacccgcgcgaccctgaccgggaaggcatactcctgctgtccccgtttgagcagcagcctggcgttctggccttccagcacctgcgcgtcgccgttaattttgatccccagtccgccgtcggaatagtcgtggacggtgcaggagaacaggtgaccatcttcgcgggcgatagccgccggcatgctcatttcgacacggtgcgaacggcgaacctgcttgctttcaaccgagaccgccaccgcgccgccaagaataatcaggttgtagaatacccagacaatactcacccagacggtgaggatttcattttccgggccgtacatgaagcgccagatccccaccgcgacgccgaccagattgagcagcaccaggtagatatagggccgggagatcacccagtcgacatactcctcttccaccagcccgcccttcgcggtgacgttgaacttgcctttatgcgggttgatcagcgccacaaaagtgggcggcgcgatataccaggccagcaccgtctcgtaaatttcactccagaacgaatggcgatatttgccctgaatcttcgagttggtcaggctggcgtggatcatgtgcggcaacacgaatagcgcgatcatcagcgctggcgcataaatgatataggcatggagcagcaaaaaggccagcggcgccgtgagaaagatgaggcgcggaataccggagagaaagtgaagcatggcgttggcgtagcagacgcgctgcaccagcttcaggcctttgccaaacagcggattatcgaggcggaatatctgcaccatcccgcgcgcccagcggatgcgctggccgatatgcgcggataaactctccgtcgccagccccgccgcctgcggaatacgcatataggcggaggtatatccccgccggtgcagacgcagcgaggtgtgggcatcttcggtcaccgtttcgacggctatcccgccaatttcgtccagcgggccgcggcggataacggcgcaggagccgcagaagaaggtggcgtcccacatgtcgttcccgtcctgcaccaggccgtagaatagcgtcccttcgttcggcgttttgcgaaaacgaccaaggttgcgctcaaagggatcgggcgagaagaagtggtgcggggtctgcatcatcgccagctctttctctttcaggaaccagcccatggtcatctgcagaaacgagcgcgtcggcacatggtcgcagtcaaagatcgagacgaactcacctttggcatatttcagcgcattattgatgttgccggccttggcgtgttcgtggctggtgcgggcgatatagtgcaccccaacatctttggcaaactggcgaaacgcttcccgtccgccgtcgtcgaggatccagatgttcagcttgtccttcggccagtcgatgccctgcgaggcgtaaatggtgtttttcaccacgttgagatcttcgttataggtggggacgaagatgtccacggttggccacaaatccatgtcctccggcagcgacaccggctggcgattcagcggccagaccacctggaagtagcccagcaccagcaccacccaggcgtaggtctctgcgaacagcagaatgatcccgcacaccaggcttaccgggtcgttccagttcagcgtcgaggtatagcgccaccagatatagcggcacgacaccgtcagcgacagcacgatcagcatcagcgccgagaaacggcccgggatgcgtcgcaccagcagcgccacgccccacagcagcatcaggaagataaactgcgacagcgggttaaagggctgcgtaatacacatcagcgccagcaccagcgagcagaaggtcacccccccaaggatcgcccggcgcagtttaggattgaggtgcgccagctctttctgtttatccagatggccggtgcgggcgttcatctgctcaggcaatttttccagccactgcgtatagcgaccgtgcaccccttccagcgccgccagcgaacgccagttgacctttttctccggctccggcacgcgcgtcgtcagtaaccacagggattgcagcaggtagcgcagcggatccagcggacgcgggcgatgcggatttatgtggggaaaataggtttcatggcgggccagaatcgcctgccagcgcggcgtctccagcggcatcagcgcccagaccagcgatgcccacagacagccaagcgacgccgacagccacgaagcgccgtgctgccgatagtcatcatagcgcgcacgcagccgctcccccaccggcggggccagcagcagcgtactgaggcggatcatgccgctctcccggcggaatagtggatcaggcaccagttcgccagggtcagcacctcttccgccgccagcgaatcctgacgatactccccaagaggttgtttcgccgccaggcactcggccatcgcctcgtcgcggtgaatcgtcaccggcaggatgcgcggctggctctccagccacagctggtagagatcttcctgcagctggctgccgacccgcagatcgttaatcagaatatcgccgttggccgggaggggctgctggtgtagacggatatggctattggcgtcgggatgaaccaccaccagcgagcgatcgcaaagcgtcagcagctcgcgggtcaacggcgaataacccgccggcagatccagcagcagccagcggtactggccctgtagctgctgtactgcctccgctatcgcccccagggtgggctgcagctggtcgacattttctctttcgccggcgctgagctggccaaacggcagtagatcgatatgctgcgtatagcgcaagcccgcgtcacgccagtcccggccgtcgagcagcgcccgcgcccagccgtcctgatgatggatatcggtattaaagaaaaagcgcagcatattatccgggctggcgtcgatcgccagcacgctttcaccgagcaattgcagggcccaggcgagtgcagccgtaatggacgtgacgccagttcccccgcgcacgccctgtaatcccagaatagccatctccggcttccttattttttctctgcaaactctgccagcagcggccagcgcttcagcgccgcgttcagctgttcgcgcctggaaatatcatgataatcaatatccggcagggaaaatgcccggctaagcgccagaaaatcattttgaaaggtgtaccccagcgtggcgtccgtgggtaccgcaggatcttttgctggcatatctctgtccgttcgaaatttattattaaaccagaggacgtatacagctcatccttaaaagcaggtgtacatgctaaaactgatgacctttaatttcaatgttaggtttactctgtcggtttcgctagtaaacttattcagtgtcaatcagggcgcacgagggatgccgtggataatgtatttactttgggtatttcatcattatgggatgaagtgtgccatatgccggtcggcggagtatggtggctcaacgtcgaccgttatgccgatgccgtcagcctgtttaatcagacgctggccgcgcaggcgaaaaacagccacgttgccgcgctggttatgggaaacaaacccaaggatatcatttcattagatcatattcacggtccggataatatcgcgctgttcaccctgccgaatcgcccccaggcgctggaggaaatacaccgcgatttagtctgctccctcgaacctggcaattatttgtttattctgctatgcgctgaaaatgcctggcaaaatataaataatgaaaagttatgcgcctgggtagaaaagaccagccgctgggcgcaatatcaccgttgcgcgttcttagcgatcaattccgcgcaggatatcgatcggcagctgactcccttattacgtgagtaccgctccctttccggactggcaagtattcgttaccagggcgaccggcatatctttgatattgcctggtggggaagcgataagggtatcagcgcccaacagcagctgatggtgcaacatgatgacgccggctggcgattagcgcaggacgctgaaaccagcgtgcagccgcgcagcgacgaaaaagcgatcctcagccatgtgcgcgtgctggaaggcgccccgccgctgtcggaatactggacgctgtttgacaccaacgacgaggtcttcaacgccgggcgcaccgcgcaagcggcgacgatcctcttctccattacccaaaatacgcaaattgaacagctgggccgctatattcataccctgcgtcgccagcgcggtacggcgctgaaaatcatcgtccgtgaacaaaccccgagcctgcgcgcgaccgatgagcggctactgctcagcagcggcgccagcctggtgatccccagcagcgcatcgctctcccgctgcctgacgctaatcgaaagcgtacagaaccaaaagttctcccgccatatcccggaagattttgccaccctgctgacctggagccagccgttaaagctgcgcggctaccagaagtgggatgccttctgcgaagcggtgcacaacgtgatgaccaataccctgcttccacccgacagcaaaggcgtgatggtggccctgcgcccggcgccggggctgcgcgttgagcaggcgctgacgttatgcaaacctaaccggatgggcgacatcatgaccatcggcaataaccggctggtgctgtttttgtcgttttgccggatcaatgacctcgataccgcgctaaaccacattttcccgctgccgaccggcgatattttttctaaccgtatggtgtggtttgaagacaagcaaatcctctcggaaatcgtaatcatgcgcggcgtcgagccggcgcgctggaacacgccgctgcctctctcggtcggtaaaaacgagaccattaacgccacccacgatggacgccactggcgacgctaccccgaaccacaccggttaaccacccgcgaggagcaagcctgatgatgtctctcgccgatattctgcaactggtggtgctctgcgccctgctgttttttccgctgggctacctgacgcgccactatcagcgccggatccgcacgacgttaagactgatgttctttaaaccccgttacgtgaaaccggcaggggtattacgccggggaacaacggttaagcaaggcaaagcgaacaaatgacaaataaaaaaacgaccgcggcaccgcttccgctctggcagtactggcgcggccttggcggctggaacttctactttctggtcaagtttgccctgctgtgggccgggtatctcaatttccatccgatgctgaacctggtatttctcgcctttctgctggtgccgatcccgcgcgaaaagctacaccgtatccgccactggatcgctattccgctgggattcgcgctgttctggcacgatacctggctgcccgggccagagtcgatttttagccaggggtcgcaaatcgccggcttcagcgccagctatatctgggatctgattgtccgctttatcaactggagcatggttggcgccttctttgttttactggtgctatggttgtttatcagccagtggctgcgcgtcaccgtgtttgtctcggcaatgatcgtctggctggcggtcagcccgctgctgccggcctttaccctatggcccgccggtcagcccaccacggccgccgccacgaccgcacaggccaataccggggccaacgccgccgctggcgccgcgtccagccccgccaacagcgatattccgccgcagaccgagccgccgacctcagccaacctgaccaactggctgaacgctttctatgccgccgagcagaagcgcaagacgccgttcccggaccagctgccggcggatgcgcagccgtttgacctgctggtgatcaacatctgctccctctcctggtcggatattgaagccgccggtctgatggatcatccgctatggaagcactttgatattgtcttcaaaaactttaactccgcgacctcctacagcggcccggcggcggtgcgcctgctgcgcgccagctgcggccagctgtcgcatactaacctgtatcagccgtccggcgccgactgctacctgtttgaaaacctggcgaagctcggcttcaaccagcagctgatgctcggccataacggtctgttcggcgacttcctgaaagagctgcgttcgctgggcggcatgcagagcccgctgatggaccagaccggtctgccggtcagcctgcaggcgtttgacggctccccggtgtatgaggatctggcggtcctcaaccgctggctgaagaccgaagaggccagcagcaatccgcggaacgccaccttctataacaccctgccgctgcatgacggcaaccacttcccgggacaaagcaaaaccgcagactacaaagtgcgggcgcagaagctgtttgatgacctggataacttcttcaccgagctggagaaatcggggcggaaagtgatggtggtggtggtgccggaacacggcggcgcgctgaagggcgataagatgcaggtatctggcctgcgcgatattccaagcccgtcgatcactaacgtcccgacggcggtgaaattcttcggcatgaaggcgccgcatgaaggggcgccgattatcatcgatcagcccagcagttatctggcggtgtcggagctggtggtgcgcgccctcgacggcaaaatgttcagcgaggacagcgtcaactggcagcagtatgtcgccaacctgccgcagagcgcggcggtgtccgagaacgccaacgccatcgtcatccagtatcagggcaagccttatgtccagctgaatggcggtagctgggtgccttatccgcaataagcgacaaggccgcctatgttggcggccttacatcgtgagacgttcccattccaccttctcagcccgcaggcatacgggcggggaaggcggcaaatcaatcaccgtatttagcgctgatcctgtttcgccagccagaccaacagcttgaggctggcagagtaataatcatccttgtcgtcaatctgcggcgcctcctgcggttcacccagcgtcagatcgcgcaccgccagcaggccgccggccatataccagggggccacctcgttggtgctgacgttgatccacgccggggtttgcaggcgcgggtaactctgcatccaggccttccagggcgcgagcaaggcgctgtgcggatcggcccacgagagatacagcgggatacggatcgcatcgaaactcatccgcggcggccactctttggctggcagcatcttgccatccgcccgcagcgccacccagtcgctgggtagatgtgatttcccccagcccatctgccccagcagcgcctgtccgtcgctctgcaatgtccgccaggcggtgagatgcgtccgctccgcgaaggcgcgccaggccgggaagatgaaataggaagggttaaggttcaggtgatcattgaggttgaaccctttcacgcccgggagcatcacctggcgaccggcgaaagtcaccaccgtagacttcagcagggcggcggtgatggcgtcagaggcaatcgcatagcgcttatcctgccactgcttttgcgcgcgcagcagcgcccaggcgatcagggtatcgccatcggaggcgttgtttttatcggcgatagggtccggcgccaccgggttatagcgccagtaaaacaacccgttagacttgttgcgcagggtgttgtccgtccactgccacagcttgtcgaacgccggacgatcgttattcgccaccgccaggagcatggcgaagccctgaccttccgtatgcgacacattgccattggcggtatcaatgatacgaccatccggcatcataaaacgggccttatagcgctcccaggccgtatccgcccacgccctgggcaccagcatcactaccgttgtcactatcaccgccactaaagcacgcaggggcataaattcactctttatggatggtagtagagaaactgaacgtcagagacggagaacacccgctcacgctgcagtatcacgtgggcactgcctccctgactctgcagccagcgagaatataacccctcgagtatggcacagaacgcgttgcaccagcgcacgcgccccgcttcgtcgcggctgaccggcaacgcctgatggcgcaggcgcaggccgtcctcaccgacatcgatggtcaccacgccccagtgaaaatgagtcagcagccggttgatattggcctccagatcccccaccgtctccgacgccggcagcggatgggtctccgccagcgaggcgcccatctgacgcaggaagggctggctttccagctcgccggcattatttagcataccttcgatcataataatcaacagatcgaaccatccggcaggcgtctgctgctgctgaaaccaggtcatcaccaccgggttattgttctccgtcatcatcaatgatctcctaacatatagcgaatatagagcccggcggtgctttcgttataatccccgaaggtgtcatagccaatctggccccccagggtcatttgtttgttgaccttgtaatccgccccggcgcgcagggtataccctatgccgctcttcgaggtcgcggagtagtaggcttccttggcaaacccattgctcaccgccgtctccagggtctgttgccactccgaattggtcgggaaataggcgctcttatcctgactgtaagactgatagcccaccgagccgccgagcttcatggtccagttatcatatttctccgtcagactgaccggcagcgatacgctgacgtagttttgcggactaaagtagcccccctgaccataggtgaagtagctgaggtttttggagtaatccatatagctcatgctcaacccggcctgcagctggcggtattcgtcatggtagggacgaagatagaccccggcattggcgttgatactggtgttgctggcgacgttctgccccagatagctgtatccaccgccgccgacatagaagcccgcgtcgccgtcgtcatagctcagctgcagggtgccgccgtttttcgtcacctgcccccaggttttcccggaataggcgtctttcagacccacgtaggaaagcaggctgtcggttagcgagcggcgttcgccggtgaggatcagcgacagatagttggtcagcttgggcgaccatttcaccccgccgactacggtattaagatcctggcccaacggcgtgctgccgatatcgacccggtaatcgtcaccgcttaacgccagcgccagttcgacgccgttggccttctgcgaatcggtcgagccgctggtctggtcaacgttcggcttgcggctggacgaagagagatagctggccacctgccccgcatcatagctcccgagcttcgccaggttttccatcccgctgctggtggtcggattgaaatctgccgcgttcagggtgccgaggccgcttaacgcctcggcccctggattgctggcgaaataggccgtccgctccgcctcggtcatcgaggcgatcgccgcctgctcgctggtggcggtactcaccatgttggagaccgcgttagccagcgggttggcgccgtagcgacgccaggcgtcgccgctggcggtcccggcgttcaacgacaccggggtgacggtaaagtcaaagcgcgagtcgccaaacggcgaggatgaccaggtcagcggcgtccggagctccgtcagcttgctggtgcccgattcgccgtcgcgtccacgcacgtccattcccccctgcagccagctgccggttttctcctgcagcgactccatcatggtgtccacctgacgcagcatccgcgtctgggcggtgtccaccggcagatcggtgcgctggatccccggcagcgtggaaccgggcgcggcggccgactgggcaacctgccacggcatgtactgcccgtaggcggaggccgtccgcgtcggcgccgacgtttgcgacacgccgataaaggggttatccgccgccagcaccccgccgacggtcggcgtttcgctactgttggtgctttgcatgcccagcagtttgccgcgggcgctgcgcagataggtcatcgcctgctgatgatgtccctgggcctccgccactctcgccagcagcagcaggcgatccggggagttatcctggcgcaaaccgccggccagctgttcagcgcgatcgttgttccccgccgacagcgccacgtcgatggccccggcgcgcgcatcctggttcggcgtatcgcgcgtcatcaggtagtcatagaccaccccggcctctttgttcattttgccgctctggtacagccgcgccatggcgaacatcagatcggtattttgcggatcgctttgcatagcgcggatcagcttgtcatacgccgcggcgtaattgccctgctcgcgcaggcggtcggcttcgttgatcacatagccattgcgaatgctcgccagctgcgtcggcgtactgctggcctgcagctgcggattgctgatcaggttctgcgcctcgccggtcagcccggcctgattcaggacggcgatctgatcggcgtaatccccggcattgccggatacgccgctgctgatattgttgcgcaccagcgagaccgcggtggtcaggtcgccgctctcggccagcagacgcgccagcttgccggcgtccgccggggcttttggcggcgtggaggccatcgcccgcagggtattgctggcggcgatggtattgccctgcgccaggtagttttcggccgtcaccaactgcaggttgtagttcacccgctggcgcaaatcgcgcatgtcgctggtctggctgccgccgggaatgcgcgccagcagcgtctgcgcctgctgccaggcgccgttttcgctggcaaacagggcggcggcatacagcgcactgttgctggcgccggggcgataggccgccgacatcagcgaagaggcctcgctgccgttacccgatttttgcagcagccgggccaggtcgaggcgcagccagggatcgtccggatagcgggcgacgccttcgcgcagggtggcaatggcgccggctgggttaccgctgctgacctgcgcctgggcctgacggcgcagggcatcgcccggcataccggccaccacccgcggctgcagtttttgccgcaggctctgcgggagcgtctgcagcatcgcctgcgcctcggcggatttattctgctcgcgcagcacgtaatagaggttttcccgcgccgccgcgttctgcggatcgtcatttaacagtgagcgcagcgtttgctccgcctggggcaaatctttgttgtgccgcagcacatcggcgcggaacagcttcgccgaggcgccctgcgccccgctctgctgcgccaacggcgcggagagcgccagcgcctggctgatattgccctgcttataggcctgctgggcctgcgccagctggccgtagaacagcgcatcggccgcctgctgacgacgggtcgccgaggcgtcgccgccgaggtccgcggcccggctcaaatactgcgacgcggcctggtagtcgccactgcgctgcgcgatatagcccatgcccgccagcgcatcggcatcctgggggttggtctgcaatacctcttcaaactgctgcttcgcggcggcggtattgccgctgttgagattggcgtagccctggccgcgcgcctgaccgctgcgccgttcgcgaaagtaattctgaacttcgctgtcctggggatgccgctgcatccaggtgtcgtaatactgctcatccccggcctgcgggcccagccagagcagcgcctggcgcaagccgctgtccgcctctttattgccgctggccatcggctcgagcagggcgatcccttcccggcgagtctcttcccgccaggttaatgctttgcccaacgccacccgcggggcgttctcctgcggatgctgcgccacgtactggcgcagctcgctgatagcctgcggatagagcgatttgtcgctggccatggtcaggtaatattctgccgccagcccggcaggcggcgtattgccattgaacatgctgcgccaggtcgccagcgccccggggatattgcctccgcgcgcctgctggcgggccaggctgagctggccctgcggcacctgcgacatctttttggcgttgtccagatcctgtagtcccgggctgtcaggggccgctttcgccagccgcgcgcgccactgcgccgccgcctgcatatcgccgccctgctgcgaccagagcgccatcagatacagcgcctgggtgttgttggcatccaccgagagcaccttctgcagggactccatcgccagctcgtcatgagatttctcatgccagtagttggcctgagcgaacaacgcctgtagcgccgcatcgttccccgccgccagcgcgccgcccgaggcagcgagagtcaacgcgccggtgaggcagaacgtggtgagccgacgggtgtttttcatcgttattattatttttcttttcattggttatcccccgaacccagacgcttacgggcgtgacgtttaaacatcgcggtcagcgccagtcccattatcgaggtggcaatcagccccagcaccgccaggaaacctgagtgctggctggcataccagaccgccatcatgtaccacggcatctgaccgctggggaacggcgtactcacctggaagctgcgcaccccgttatcgctggtgatcaccgcggtatcgccgcggatcccggcgttaatgcgcggcgattccagatcggtcttcagtcgcgccagctggtcatcattgctggccagcgccaccaccaccaggcgggtggaattccacggcgagcgatagctgatgaacccgcgccaggcgctgctcgacgaaaagtagcgatcggcgtcgaggctggcggaagtccagtcgccggtgagccggcgctggactttttgccacaagtctggctcgcggacgctcagcacattatctaccgggcggtagggtgagtcggccagcaggctctggttaaaggcctgctgatcgagagcggtgaccgccagcacgtcacgttcacgcagcgactgcaaatcccccccgccggtgggcatcccgagcacgacgcggttattcgccagcgcggtgccggtcgcgttcccggagcgtgccgccagattcagcagggtcgccacctgggtttcagacgggtccgccggcagcagaagggtcgtctgcgaatagtccgccagccgcgagaaggggaacgaggcgccgacaaagtaggagagattgggcaacagcgagaagtgacgcgtcttgctcaaatcgatccaggagtcgtcagtgatccggctcttgatattgttattcagcagcaccgaacacggaacatcgtcctttggcaccacattgaagtacatcgacagctggttatcgccgtaaatcaggtagggcgccagcgggatggtaaagcgctcctggcgcgcatcgcctccgaggtagcgccagactttctccagcggcccctgcttgttcatcggcaggttgttgaggaaggtgccgttgagcgtgacgctcagcaaggacttgtcctcattaatccagctttccgacgggaagcggtagccaacctgtagcggaatggtttccccatcccacagatagagatcgggcgcggcgcggaaggcgatacgtaaaggttcgtgccagacgccgctgacggtcgggctttgatccttacgcagcagctcgctgagcttgaccggacgatcggtggggatccagcgcggggcatcatatgctttgccaaccgggatggtctgcggttcgacatccagcgtcgcggtttgcggcgcaaagttgccgcgggttaaccgccaggcggccatgcgcagcgccgtatcgtttttaccgacaatcagcagcagtttataggccggattggcggggttggcgatgatgcgcagcagcggcttatcggtttccggcagcatcatgccgcccacctgctcccccggatggccaatcacgatgccgtggcgttccggcagacggtcgcgcagagcgctgaaggcaatgccgcgatagtccgcctggatacccagccaggaggagatcagcgccgcggcgctgaagacgtccgccgacggcttgtccccataggcgaccgcaatgtccgccggggtcatctgcatgctgtcaaagaagggccgcgggaagtggctcaggtcgtcgctgatgttcagctgctggctttcccagctgaaatgcgacgtgggcagcaccgtcacccgcgacgtatcatgaatgtcacgctggcactgcagggtatcgccatcgttgatcttcacgctcaggttattgctggagaccatcagcgcgggcggaatatccagctgataatgggagacatcctcgccatcggcgcccagcggcagcgtgccgagcggttgaccgttgagcatcagctgcagggtggcgttgcggctcgccatctccggcgatacgcgaacggcaaggctgagctgagaatggatcaccacctgatcggcaggcagggtaaagctgaccccaccctgtcgctggccgccgctgaggataatcccgtccggcatccccatctgcgccagattcagatcgcctccccagaccggagcgacaggaatgacctccggcgcggccgtgccgctcaccggcgggggtaagtccggcataaccggcgcaggggccgtcgccgccgcatcgccggcggtggcgggggctgccggagaggcgccctcctccagcgaggcagccggaggttcgtcgcctggctcgctgtccgccgcgtcgttgagctgcgggaagctcagcggggcagcggagccggagcccggttcttcactgtgtagcgcaggcgcagagagcatccctgccagcagcgccagcgtggttaatcgcttcataacgtcccatcctcctgcgccgttttcgccactgttgcccgattgcgctggctgcgacgggttttccacgtcagccagaacagttcgaacacgcagcgtaaaatggtgaagaaggagcggaacgggttatcctgcgggcgcggcggattaatccacgcatccgcgcgggccagcaccacgcgcaccagttcacggcggcgcgaaagcggaatatcttcatcaaacttgaggcgcaggaagcgctcgtcagaggtgaccagctgggccggaatcgagatagccccggactgcaggatcagctcaatctcttcgatgtcatcctccagatggcgattatcaggcgcgaccacgcggcagccgcccatcgacaggtccgcggtatggctgcgcgagacgatgccgctggcgtaatggatcaccaccggaatatcgacatcgatacgaatggtttttcgcacctgccgcgtttcgcgcgccacggcaatcgccgccagcaggaagatcagactgtagatcccccacccgacgttgagggcgataacgttgggatccgagccaaagtagtcatggccaatcgcccggacgatgccgaccaccacccccagggccagcaggcaggccaccaccaggtgcgggcgcaccacggtgaaatcgaagtagccgacgtcaagcagcccccccttatcggtaacgttgaacttgccgcgtttggggaaaatcatcgtcaccagagtcggcagcaccaggtggaaggccagcacaatatcgtagatctccccccagaagctgtagcgatagcggccgttcattcgcgaaccgacgtaaatagcgaggaacaggtgcggcagggcataggagacgatcaggctcgccgacgagtaaataatattgaggttaaacagcaggtaagccagcggggcagtgacaaacaccaccctgggcagcgcgaactggtagtagagcatggcgctgagatagcacaagcgctgctgaaaagtcagcccgcggccaaacagcggattatcgacgcggaaaatctgcgtcatcccgcgcgcccagcgggtacgctggatgacgtgcaccaccaggcgttcagtagcgagacctgcggccagtgggatatcgagaaaggccgacttccaccccagacgctgaaacttcagtgccgtatgagcatcttcggtcaccgtttcgacggcgaaaccgccgatctgcgccagcgcctcgcgacggatcaccgcgcaggagccgcagaaaaaggtggcgttccagttgtcgttcccctgctgaatcgggccatagaacaacatcccttcgttgggaatgttgcgtccgacggagaggttacgttcaaacgggtccggggaatagaagtagtgcggcgtctgcaccagagccagcatcgggtctttcaggaaaccgccgacggtggcctgcaggaagacgcgcgtggcgacgtggtcgcagtcgaaaacgcagataagctccccctgagtcagggtcagcgcatggttaaggttccccgctttggcgtgcttgttgtcattgcgggtgatatagcccacgccgacgtcggcggcgaagacggcaaactcgctgcgcttaccgtcatccagaagatagattttcattttatcttttggataatcaatgcattgtgccgccaggacggtatcgcgcaccacctccagcggttcgttatagctcggaatatagatatcgaccgtcggccacttactcatatcatccggcagcggaacaatgccgcgcttcagcggccagaccgtctgcagatagttaagcagtagcatcacccagatatagacttccgccagaaagagtcccatgccgagaatagcttcaatggacgagttgaagtgcagggtctgcgtgaggcgaaaatacatgtaacgggtggacatcagcagcgacgtgacgaccataatgaccgatacgctgcggcgcttgctgaagcccatcagaaagagaataccgatacttaacagaccaaaaatatactgcttttggctgtccatcggcgtgatcaccaccagcacggcgacgggtgacagcaccagcgccagcaaccaaaaaagagattttttcattcagcagccctgcaaaaagttaacgccctgacatgcgtggctggctgtgcaccgtgccatcgccaatatgaatacccaacagcgaagatatttttttagccatgatttcaatatcgaaggccgctgccgaggaagcgttaaagtccaggatcgacttctgcgaggcattggcctccaccacgctttcatcacgatggatcacgccaagcagtcgctcgcccagtttctcttccatcaggctggtgacgtcccggctgacctggcgacggctatcgctttggttaatgacgaaatagtgcccgtgcttatgattcagcgccgcgccggtcaggcgctgcttttctacgtgcgccagggtcgacatcgaggcggtatccgccagcagcgggataagatgcaggtccgccagccccgtcagcgcctttagcgcgggcgaaggtccagggggcatatcggcgatggtgataagcccgggataattaagcagcgcggacagaccgcgctggaggaaatggtcattatgggtcagttgctcatcaaacgcctgacgctgcgcctcgctcacttcgccatatggcaggacgaaaatattactgccggcgctcaacacgcactggctccagtcgtgcagctccagcgccttcgccacatagccccgctcatcgttcagcggtacgccaaaatgcaaacgcagcgcgttctggacatcaaaatccagcgccagaactttgctgcccgtccgcgccagcgaataggctaaattggccgccagggtcgttttccctacgccgcctttcggtgaacagacgcaaatcaacggcatgtcgcgatcctttccagaagtgatttcaaaggctggtctttatttttcgccaccggctccgcgcttttcgcggcgaacaggtgggcatagttctcggcggcgggcgcgggtcggggggccattctcggcggcggcgccatggccggttccgacgccggaattgaaggcgcaggggtcggcgcaggctcctgcctgaccggctccggtgcggctgcggcggtctccactaccggctgggaagtagcaggcgcggccgaagcggcagacacaacaggatcagaggttggcgccgctgctacggccgcctctacctggcggaacagatccgcgggcaccgactgcggcaacggcgcggagaccgagcctcccagcgccagagaagagggtttctcggcgccgggatttagctgattgaggatcgcccagtcgccgtgttcccgcgtggcggcttgcgaagaaagatcctgaaagttgaggttttgcgtccgcgttttttcttgaaagcgctgcagatcatcataatggttcattgataacctcatgattttaaaaatttcatattaagtttgttgttattttctgggtatattaaaaatatcgtgacgcttctgggatggcagataacgcgccgatggtgacgtaccaatacacacgattgacagggttataatagtttagaatttgattttcgggatgattccacggcagaagtatcgctacactaacatttcccttgcagaagggtagccccattttttaggtatgcgtacatccttaacttcccgcaatcaccacgcttcccagtcgtttttatataaaagtattaggtcatgatgaaatcatagcgtcagatcagcgaaagaataaacctgaaccattttaatttctctttaattctataaaaatggactgaaaggcttattttttcggataatctacgaagaatgctctgagagcgtgacataaactgcggcaatatgcgtaagcgccaggttttatccacggcgggagagaagctcccggccatgggaccgggagcgcgccatcaggcgtgggacttttgcggattctcatcctggtcgacggcaaagcaggccaccagctggccgccgtaatccttcagctgcggctggagctgagtgcaggggccaaagcgacggcgacagcgcgcgttaaaggcgcagcccggtggcggatttagcgggctcggcagttcgccggtcagcttgatccgctcgcgccggtcgtctgggttcagacgcggcgtcgccgacagcagcgcctgggtgtacggatgacgcggattgttgaagatctggtctttggtgcccttctccacgcagcggccgagatacatcaccatcacttcatcggcgatgtgctcgacgaccgacaggtcgtgggagataaacacgtaggacagccctaaatcctgctgcagatccatcatcaggttcagcacctgggcgcgtaccgaaacgtccagcgcggagaccggctcatcggcaatcaccacatctggatccagcattagcccgcgagcaatagcgatacgctgacgctgaccgccggagaacatatgcgggtagcgatcgtaatgctcggttttcaggcccactttcgccatcatcgccagcgctttttcacgccgctgctctttgctcaggctgctgttaatcagcagcggctcctccagaatctgccccacttttttacgcgggttcagcgaaccataagggttctggaacacaatctggattttttgccgccgcagcttctgcgcctgcgggtcgtgcttaagcagatcctgcccctgataatagagctcgccgccggtggggatctcaatcatcgtcagcagacgaccgagggtcgatttgccgcagcccgactcccccactaccgccagcgttttaccgcgctcaagggtaaaggagacgccgtccagcgccttcaccagccgttccggggcgaataaccccttcttcaccggatagtgttttttcagatcaatggcctgcaacagcggttgtggcgtggcggccttttgcgtactcataatccaggcctcccggcatcatcgagtgggtagtgacatttagactggcggccgccggtcagatccgcgagcgccggctcttcgctacggcatttatccgtggcataggggcagcgcggattaagcaggcagccgttgggacggtcatatttccccggcaccacgcccggcagcgaggccagacgcgctttatcctgggcgaattccggcagcgcgcgcagcagcgcctgggtataaggatggcgcggcgcgcggaagatatctttcgcgtcaccggtctccaccacctgacccgcgtacataacgataattttatgcgcggcttccgccaccagcgccaggtcgtgggtgatcagcaccagcgccatattctcctgctgctgcagatccagcaggagctcaatgatttgcgcctgaatggtcacgtccagcgcggtggtcggttcatcggcaatcagtagttttggccgacaggcaatcgccatcgcgatcatcacgcgctggctcatgccgccggaaagctgatgcggatagacgtccagccgcgaggccggatcgggaatgcccaccaggttcagcaggtcgatggcccgctggcggcgggtttgcttattaccgccctgatggaccttaatcgcttccataatctggtagccgacggtgaagcacgggttgaggctggtcattggatcctggaagatcatcgccacttccgcccccaccagctggcgccgctctttttcagagatgcgctgcagatcgcggccgttaaattccagtttgtccgccatcacccggccgggatagtcaatcagccccataatcgccagcgagctgacggatttaccggagccggactccccgacgataccgaccacttcaccctgcttcacgctatagctgatgcggtctacggcgcggaacggcgcgttttcatcgccgaaatgcaccgataatttatctacattcaataacgccatctcgaacctcttactgcttcagtttgggatcgagcgcgtcacgcagaccgtcacccatcaggttaaatgccagcaccgtcagcaggatcgccacgcccgggaaggtgactacccaccaggcgctctgcgcgaactgcaacacgtcggaaagcatggtgccccactccggcgtcggcggctgcgcgcccatgccgaggaaccccagcgctgccatgtcgagaatggcgttggaaaagcccagcgacgcctgaacgatcagcggcgcgagacagttaggcagaatattaacgaacatctggcgcatcgcgccggcgcccgctacgcgggaggcggtcacgtagtcacggttgacctccaccagcaccgcggcgcgcgtgagacgcacatagtgcgggagcgccacgaaggttagcgccagcgaggcgttgacgatggagggcccgaagattgccaccagcaccagcgccagcagcagactcggcagcgccagcataatatcgacgacgcgcatgatgattgagtccaccactccgccgaaatagcccgccaccaggccgagcaccacgccgaggatcagcgacagaaccaccaccaggcagcccaccagcagcgacagtcgggcgccgtacatcaggcgcgacagaatatcgcggcccacgtcgtcggtgccgagcagatgcgccatgctgccgccgtcctgccagaacggcggcgccagcagcgaatcacggaactgatccgccgggttatagggggcgaggaagttggcgaataccgcgatgacgatcatcaccaccacgtataccagcccgacgactgcccctttgttgcgtttgaaatagtgccagaactcctgcagcggagtcatgggtaccggcgcagcgataactttattttcagtaacttgtgacatgatggccccttacttcttatgccggatacgcgggttcaccacgccgtacagcaggtcgaccagcaggttgacgaggataatcatcgtcgccaccagcagcaccccgccctgtaccaccggataatcgcgacgctgcagcgcgtcgatcagccagcgacctaaaccaggccatgagaaaatggtttccgtcaggatggcgcccgccagcagggtgcccacctgcagaccaatcaccgtgaccaccggcagcatcgcgttacgcagcgcgtggatcacgatcacccgcatccgggtcaggcctttggcgcgcgcggtacggatatagtcttcgccaagcacttccagcatcgacgaacgggtcatacgcacgatcaccgccagcgggatggtgccaagcacgatagcgggcaggatcatatgcattaaggcgtcaataaagtcgccctgctcgccccagatggcggtgtcgatcagcataaagccggtcagcggcagggtatcgtcaaggaacaccgtatcgctgatacgcccggagaccggcgtcaggtttagctgcaccgaaaccagcataatcagcatcatgccccaccagaagataggcattgagtagccggtcagcgccaggcccaccgcggtgtggtcaaagatggagccgcgttttaccgcagccagcacgcccaccggaatgccgacggcgacggcgaagatcatcgcgcagacgcccagctcaagggtggctttaaagcgtgggacaaactcctgccacacgggaatgcggcttttcagcgagatgcctaaatcgccgtgcagcacgccccagatatagtgggcatattgctgccacagcggcttatcaaggcccatttcggccagcagctgcgcgtgacgttcgggggaaataccacgttcgcccgccataatcatcaccggatcgccggggatcatatggacgaaggcaaaggtgagaagggtgataccgataaatgtcgggatgactagtcccagacgtcggagaataaactgcaacataacccggattctctctagtgacgccccgcctggcgacagggcgtctgtattgctcacaaaagcattccccggaatagcgggaatacgccccccgcctctcccacgcggggagagggggtcaggcatcgtgcttattattcgacagagacgttatcgaagtggtgtttgcccagcgggtccaccacatagcctttgacttctttacgcaccggctcatagacggtggagtgagcaatgatcagcgccggagcctggtcatgcatcactacctgagcctgtttgtacagttcaatacgcttgttgtggtcgtcggtagcgcgggccggctgaataagatcttcaaacggcttatagcaccagcgcgagtagttggagccgtctttcgccgcggcgcagctgaacagggtcgcgaagaagttatccggatccccgttgtcgccggtccagcccatcatcacgctctggtgctcgcccgctttcgcccgcttcagatactcgccccactcgtaggtgacgatcttggcctggacgccaatcttggcccagtcagcctgaatcatctccgccatgcggcgggcgttcgggttgtacggacgctgtaccggcatcgcccacagatcgatggtgaagcctttttccaggcccgcttctttcagcagctgcttcgccttctccggatcgtaggtgtagtccttaacgtcgtcgttatagccccacatggtcggcgggatcaggttcttcgccgcctggcctgcgccctggtaaaccgctttgatgatcgcttctttgttgaccgcgtaggtcagcgcctgacgtactttcacgtcgtccagcggtttcttctcggtgttaaaggagagataaccaacgttcagacccggctgttccagcagggtaatgttcttatcttccttcatgcgcgcgatgtccgccgggttcgggtacggcatcacctggcactcgtttttctgcagcttggcatagcgcacggaagcgtccggggtgatggagaagaccagacgatcgatcttcggcttggtaccccagtagcccgggaaggctttatacagaatgcgggaatctttctggtattgcagcagctggaatgggccggtaccgataggattgagatccactttttccggcgtgccggctttcagcatgttgtcagcatactctttcgaaagaatggaggcgaagtccatggccagatcagcgaggaacggcgcttccggacgggtcaggacgaactggacggtattatcgtccactttcttcacttcgctaatcaggtccggtaagcccatcccttcaaagtattcatagctgccgccagaaactttatggtacgggttattagtattcttctggcgatcgaaggagaacaccacgtcatcggcgttcaggtcacgggttggtttaaagtctttattatcctgccacttcacaccctgacggaggtggaaagtataggttttgccatccgcactgacttcccatttctcagcaagtcctggaataacttccgtcgtaccggttttaaattcgaccaggcggttatagatcggtacggagctggcatcataggtggtgccagaggtgaagagctgtgggttaaatccttccggcgagccttcagaacaataaaccagggttttcgcttgcacgctggcggcgacggtcatggcgaccaggctcagaccaagcttcagcatccctgatttcttcaaggaaatactcattattctgctccaaaattgtgatgttgtttgcatatatccgccggacctttatttattttttacccggtccggtcggtggtgcccgaaggcgtagagagagatggggattcctttcgcaaaaacgactgagttgcagtacggattctccatgaaatgcccctcatgccctacaatctgtcaacagaatggggaaacgtcaatacagccagccgggttttacatccagcgtgagaaacggcaggcaaagattaaaaaaacttcaggacgctattttcagcagagaaatttatgctactggcaattcagcagaataaagaccttattaatttgcaacacccagtgggaaacaatgccagcaaatgagaaaaatttcttgctgtgtgaccaatatgtgagcgattaatagcgtgaacgttaaaacgcacagcggaaaatgctgcattcagccataagcttcgcgaaaaaagatctgttcatcgataaaaaaatgcaatggaagatgtcacaaaatagcgaatagccggctgaaaacctgagtaaagacgtttattgtgattttggtggtatttttggccagtcgtgcactgatgatgcccggcggcgctgcgcttgcgcgggcctacgaaacgcgagtcgaacctcctgccaccggaggttctcatcctcgcaggctccagatgcaaaaaagcctgctcattgagcaggcttttcgaatttggtcggtgatagaggattcgaacctccgaccccttcgtcccgaacgaagtgcgctaccaggctgcgccaatcaccgaatgcggggcgcatcttactgctgggatgcctacccgtcaatgccttattttcaaaaaatcgctcaaccggcgagaaactcagcagcctgagcagcgaatcgccggttgctcaacgtttttagcggcagttgacctcaaacgttttgcgatactcggataccttacatgtcaccggctcgccgagataggttgcgcccgccggggtgaatgtaaactctcccagtagcatcgtcagctcccccagctccgggcaggattgctgatgacgcataatatccgggcgggtatcgttattcaccgcccgggcgatgtcgctgtatgccagcttgtcggcaaaggcattagcacaaaactgcagttcgctttgcgccatatgcgcggcctgccccttcagctcggcatgctgtgccagcagcagctggcgaacctcgccggcccggctgtagccaatcgccgtatagccggccttattgctgaggttgacgctggcgccagccgcaagcagcgcctcgacattggctttattattcattttgaccgccagcatcagcgggctgagatcgttggcggaaagctggtccacctttgcgccgcgctgcgccagcgccgcgatcaccgcaggcgccccctgccccgccgccacctgcagcgccgtgagtccttcacggttcggcttatccacttccaccccggaggccgacagcgccagcaccagatcgggatcatcccccgccgccgccagcatcagcggtgtggtgccggatttatccgccaggctggtgtccgccccggcgttggccaacgtcgtgatggtttccgccgatcgcgcgtgatcgacagcgaggaaaaaggccgattccccggacgcgttgacggccttcacgtccgcgccgtgcttgaggagcagcgccacgatctcgtcgacgttcttcttaaacgcgccgggcgccagttgtaacgccatgtcttcggtcatcagcgcgcgattgcccgtcgccagcgatttcgccgccgttgcgccaactatcttgtccagcgtactctcctcttcgacaggcgcatcgggctttttcatcgccagaatatgctgatagtcgtttctgacgtccccgccgtcggagatggcggacatcaatgccgtactcttgtcgatggaggtctgattcaccgacgctcccgcctggagaagatcgccgataatcgcggtatcgctgccacgcgccgccgccagcatcagcgccgtgacgccctggcgcgtctggaggttcggcttcgcccgacgcttaagcagcaattccaccacatcgcgacgattttccgcagcagcgaccatcaggccgcttaagccggttttatcctgaccatccacatcaatgccgttatccagcatggctgcgatcgtcgctggcgcatcgtatttacaggccagcaggaactggctggtctcttcctcagactggcagcccgcgagcatcatcaggcacagtaggaccaacccctttatcaccttcatcctttctctccatgaaaagttcatgcacaggggaagcgaggaaacaggggtaatcaaagaagaagaggtcacctgccagacacgtccactgtgcgaaaaaaatccctcgcgcggcgtcagccggcgagggattagcttatcctgggctcaggaaaggaaaacagacccgagaatctgaaaactatcgggccttactttttccaccggcaccagttgttgttctcattgatcccgccatccggcgaggtatagccgaggcagcccataatggtgtcgtacagctcgacgtgacggcgcggcaccttcatcgcagcctgctgctgcagatgggcaaacgcggcggcgtgatcgggattttccaggtacttatccgacatccacaccatcatcggcacgcggaactgctccggcggcgccatcttgcgcggcgtaccgtgcaggtgttcacgctcgttaatcgactccccgtggtcggcggcatagaacacaatcgctttcttatcccgcagctggtcgaggacgctgacgataaagtgatcgacataggtcacgctattgtcgtaggaattgatcagttccgctttcgagcacttgttgtcgacgccgacgcactccggtttccactgggcgaagctgcgcgggtagcgttgggtgtagttaaagtgggagcctttggtgtggagaatgatcagatgcttaccggaggcgttgccctgcgccataccgcgcttcatctcatccaccagcagcatatcgtcaacgctcttaccgcggttgcgcggctcggcgccaatctgctcgcggtaggcgatattgttggccatcgtgttgctgtagaaccacatctcgctctgcatggcgtacagattgccgctgaagcccagctgatgcagcacggcaaagacattctgctctttgagcgtccgctgtgggttatcttccgccccgccctcgcgcacaaacatgcagcgtaacgacagtttggtagcggtatcgcacgagtaaccgcggaaggcgacgagattcttctctttctccagctctggcgtggtattgcggctatagccgaggatgcccatatggtcccagcgggtcgtttcgccaatgataaacaccacgtaggtatcatccagaccttccggcgcgacgtaggtgaacttcttcgccgggttaatcagcgatttgttgtctgaggattcatccacctgcgcccaggcgtacagtcccagcgccgacaaccagttcgacggcaggtaagagttggcgatcaccccgccatagctcggcatatccacttccgaatggcgctccacatcatgctggcgcagctctagcaggcggatgggtccccagacaattagtccggccagcaccacgatcagcacgtttttaacccgctggcccggggtacgcagctggcgcagcagcgtatggcggcagcggttgctccagatgaacagcaacggcggcgcgctcaccgccaccagccagaggatcaggtgccagccgatgacctctttcgacaggtcgatatcggtggtcatcaccgaagcgataatcccgtagccaatcaccacattgaggaacgtcatgtagtaactcgccgcggcggaaaacaggacaatcagcgtcgccagaatgcgccagatacggcggccgaacagcgacagaagacgtaacaggaagaaggtgacaaataccgtggcaaccagttcaacaacaccggaaagccctttccagaaagtgaactcttgagcataaccatcgaaacgccggaaaaaaacggcgacgttcataaaccagccgatgtacagcgccagccaaaaactaagcttctgctgcgtcatcgttctaatatatttcatgcaagcaaacctggaaaaagaagaataaaacaccgcctgacgctgtggcacgagtcagtaggctaatagggtgcgttagggttggttatcagaaacctctacaaaccgcgataagtagaccacagggaacgagaaaagtatcaggagggaatgtgatccagccaaacatttacaaaacatttggctggattggcactatttgcttagggaaataaccaggggcacgtttcacgctgcaggtttcaggcgtgcgcctcgttatataccgtgcttttcggctgacgaatggtggtggataacgccagcgagaggatcagcagggcgaagatcacgcagaaggtcacgtagaaaccgccgaacagcgaagcgatgagagagccgcagatgctgccgataccgaagcccagataaatcacgccatagtttttcgccagattgttcagaccaaagaactcactcaccagcgacgggaagacggtaatggtgccgccgaagttaaaggcgacgcaggcgatggcggcgaagaaggtcaaggcattcagcggggcgaacagcagcgcggccatccccaccagcgacacgacctgaccgatggtaatcacgcgaatgcgggagattttatcagacaggatacctaacaccaggcgaccgctgaggttcgcaatcgagataaccgttaccgcgttggccgccgtggcgacatccaggtggaccattccctgggcaatatccttcgctacgccaattacgtacagaccgctcatgcaggccgtcaggaacatcaccgccagcatccagtactgcggtttacgcatcgattcggcgagggtgaagtcgttttccacgacgccgttggccgcggtggctgccgagtgatttggcgcatctttcatcagggtcgcgccaaagacgatcatcaccagcacgatagcgccccagataacgaaggttttttccaggccaacggtggccagcaggtgggaatcaatgaatttgaaccccaggctgccgagaccataggagccaatggagaaggcggagatcagccctttacgttccgggaaccatttcacgcagttcgacagggtcagcaggtaaccggcgccgtccgccagccccaccagcacacccgcgctcagccacagcatcatcaggctgctggagtgcgcggtcaggaagaagcccaggccgagcaggatcccggaggccatggtgacgcgcttcacgccaaagcgctcctgcagcttgccggcgaccgacgaagagagcgccagcccgaggctcagcagaccaaaggaaaaagccacctgactgaccggctcgcccagtttgtcagacagcgaactgttaaacaggctccaggtataaaccgaaccgagagcgaattgggtgatgatggtgccgatcagtgtcagccagcgggtcgattgacggtttgcagcgttcatagcagttgtcctgataaattaactgccgccacaatagcgaaggcccctcatccagtgggggaaaaaggcatgaactgccatcagcggggaatgaaatgcattaatgttggaatgaatggcattgcataacattcattccgtaaattacaggcaaaaagttagtgtgcgctatctcacagaaatgcgccattgctgagatttaacaataaccacatcgtttcaaatgcgtaacaattcccgattaaaaattggcgctgacccccatcaaatagagcgtattttcccctgacggcaggttatccgcctgcgacagcgttgcccatgccgccacgtgggatcccaaccgcatatcagcgcccagggtgacatcgctccagcctccctccctggcacgggtcatcggcgcccagacatcgctggcgagcgactggttatagctcacctgcgcccagggatgcacgccccacagcgcctgataatccatgcgccagccgagcgtgttaacgtagcccgcctcgcctgcgcttctcaccgtcggcgcggtgacgtcgctgcgcaggctggccaccggcccggaggttacgccgtttgccagcggataattccagccaacgctcaggccgcggccgctttccggcggcgccagcccctggtttaacgccagcccgccgggcgtctcagaggacttcatccgctcggcgagaatatcttcataacgtggttggtgatcgctatcccatgtatagcgttccgacgtattactttttgtatcgatagcgatatattcctgttgccaggcattcgctccagagacacatgacacccagacggatacgctcgccgggatcaagaacccccggaggccattgcatttctttattatcattaatgcgactccagaaaagagccgaatcggcaatattgctgtgtttttagtggggatacgatttccctgtattaactattatctttatctttcagccgtcaaggcgggcgtccacttttttagcgcagagggagaaacagctatgcagcgttgcggatgggtgagtcaggatccgttatacatcgagtatcacgataccgaatggggtgtggcgcaaaaagagggtcgccagctgtttgaaatgatctgccttgagggccagcaggccggtttatcgtggatcacggtgttaaaaaaacggcagaactaccgccaggcttttcaccagttcgatccggtgcgcgtggcggcgatgggtgatgacgatatcgagcgactcctgcaggataccggcatcattcgccatcggggaaaaatccaggccattatcggcaacgcccgcgcctatctggcgatggaagaaaatggcgagtcgttcactgattttgtctggtccttcgtcgacaatgcgccacaggtgacccgcgctgcgacgctggcggaaattcccgccacgacgccggcctccgatgcgctgtcgaaggcattgaaaaaacgcggctttaagtttgtcggctcgacaatctgttattcctttatgcaggcctgtgggctggtcaacgaccatgtcaccggctgcttctgtcaccctggaggtcaggatgatccgcaagtgggacactaaagataccgcgccgctgctggcgctgtggctggacagcacgattcatgcccatccttttatcagcgaaagctactggcgcgacagcgtcgcggtagtacgggatgtctatcttcccgccgccagcacttgggtctgggagcaggatggcgagttaaaaggctttgtcagcgtgctggactcccgtttcgtcggcgcgctgtttgtcgcgccgggcgccacccgccagggcattggccgggcgctgctggatgaagtcaaacagcactacgcctggctgagccttgaggtttatcagaagaacgaatcggcggtcagtttctaccatgcgcagggcttccggattgaagactgcgcatggcaggacgatactcagcacccgacgtggattatgcgttggccggcggatcaaatgccgtaagcggcagcgccgggccggtatatttctccagccacgccagggcggtgttcccggcacagccgttgcccagccgggatgtcggaatatctttggttaagacgttcaccgccccgtttttgcagatgccgacctgcggatccaggtcgggccacgctccttcatgcaggcaaatcacccccgggcggatcccctccgtcaccacggcgccggccagcacctgaccgcgggcgttccatacccgcaccagatcgccatcgacaatcccgcgcgcctgcgcatcctgcggatgaatagtcaccggttcgcgcccggcgacggcatagcgctcgcgcagcgcggtgtggttcagttgactgtgcagacggtgggccggatgggccgacagcagctgcagctgccccgcctctgcgttgccatgccactcgtcgggctccagccacatcggatgcggcggacagtcggcgtaaccaaaagcggcgatggtcggcgagtggatctctattttaccgctcgccgttttcagcgggttggcctggggatcggcgcggaaggcggcgaaacgcgcaaaacgggcattctccggctcctccggcatctcaatcagctggttagcctgccagaattcggcaaatggcggcagcgtcacctgctgctgggcgccgcgccgggcggccatctgatagaaagtctccagccactgcaaatcactcttcccttcggtgaagcgttcgcggccacccgcctcccagcgttcgctgaggtcggcaaagaccgcgaaatcgtcacgcgcttcatctcgcggggcaaccacctgcttcatcggcaccagatgctggttactgtagtccccggtcatggtcagatcgttgcgctcaaacgaggtggtcgccggcaggacgatatcggcatggcgcgcggcggcggtccagaagcattcggaaataacgataagctccggtttctgccacgcctgaatcagtcggttggtgtcctgatgatgagtaaagttggcgccgccggcccaccagataaagcgaatatcgggaaagcgccgcgccatgccgttgtgctgatactccgcccccggattctccagcgcctcgacaattcgtgcgaccgggatcttctccaccgcgtccacgcctccggccacgctcccctgcatcgagcccagcaccgccgcgcggcgggtcgggttgccgccgttggcaaaatggtaggaaagaccaaatccgccaccgggggtgccgatctgtcccagcatggcggccagagtgaccagcatccagtgtttctgctcgccatactgctgacgctgcatgccccagccggccatcagcatagtggtattttcgtggaaaagttgcgccagttcgcggattttatctgctttaacgccgcagatcgctgctgcccactcagcggttttcgctacgccgtcgctttcgccggtcagatagcgggcaaaaatatcgtagccgctggtgcagcgggtaagaaacgcatcatcctgccagtcattttccaccagcgtatgggcgatccccagcatcagcgcgacgtcggtgcccatatgcggcgcgatccactccatcgaatcgccaaagaaatcgacggtttccgatcgcatcggatcgatgcagatcagccgcttaacgctctggcgcagccgatcaaaccaccggatcccttgctcgtcggaggcattccaggcaattttcagcgtgttcagcgggttggcgctccacagcaccaccacttcgctgtgctcgagcaccaacggccaactggtctgctgctgatacacctcattgccgccaacgacgtaaggcatgatcgcctgcgccgcgccggtggagtaatcgccaagatggccggtatagccgcccgccaggctcatatagcgctgcagcagcgtcgccgccttatgcaatacgccgttagagcgccagccgtaggagccggcaaaaatggaggccggaccgtagctgtcgcggatccgccgatgctgggcatcgatcagatccagcgcctgctcccagctcacccgcacgaattcatcctgaccgcggaccccctggggcttgtccggtgaagcaaggaagcctttacgcaccattggatagcgcacgcgggttttgctgtgcacctgatcgcgcactgccgtttgcagcgagttggcaaacggtgtcgccagcgcgccgcgggaagagaggacgttttccccgtccgtttccaccagcatcggtccccagtgggcggcggttaagatggttttggttgcagatgaggttggcaagggcggctcctggtcagcgaatgcaggtgtcatgacggcgtgatgggcaaccgttcaatgttatttacaaaaagagatggtatccggggaattttctccgtaatcgcgcgtcataatcaaccgtcacgttcgctgtgacaaagaataaaaaggattaaggacattaaatgaaaaaacgcgtacttatgattgcggcgctggtcagcggcactctggccatttctggctgcaccaccaacccctataccggtgaacgtgaagcaggcaaatccggtattggcgcaggtattggctccttagtgggcgctggcgtcggcgcgctctcctcttccaaacatgaccgcggcaaaggcgcgctgattggcgcagcggccggcgcggcgctcggcggcggcattggttactacatggacgtgcaggaagcgaagctgcgcgacaaaatgcagggaaccggggtcagcgtgacgcgaaatggcgacaatatcgtgctgaacatgccgaataacgtcaccttcgacagcaatagcgccaacctgaagccggccggcgccaacaccctgaccggcgtggccatggtgctgaaagagtatgagaaaaccgccgttaacgtggtcggctacaccgacagcaccggcagcaaggatctgaatatgcgtctgtcgcaacagcgtgcggacagcgtcgccagcgcgctcatcacccagggcgtggcggccaatcgcattcgcaccaccggcatgggcccggcaaacccgatcgccagcaacagcacggcggaaggcaaagcgcagaaccgtcgcgtggaaatcaccctcagcccgctgcagtaagcgcaacctcatgtcgcccggcagccgttctgccgggcaaaatgcttgatatcgctatttttcgcgctaaggtgttggcagattttcagcaaaggaagccaccatggcgaaagcggcgcgtgcaactatcagcgatgtggcgaaagccgcaaagaccggcaaaaccagcatttcacgttatcttaacggcgagaagcatctgctttccgacgacctgttatcacgtattgaaaaagccattgccgaactcgactaccgccccagcctgatggcccgcggcctcaagcacggccgaacccgcctcatcggcctgatcatcgccgatatcaccaatccctactcggtcaacgtcatgagcggcattgaagcagcctgccgggaaaagggcttcaccctgctggtgtgtaataccaataacgagctcgatcaggagctgcactacctggacctgctgcgcagctaccaggtggaaggcatcgtggtcaacgcagtcggtatgcgggaggatggcctgaaccgcctgcagcagtcggccctgccgatggtgctgattgaccgtaaaatccccgacttcgcctgcgatgtggtcgggcttgataacgcccaggccgccaccaccgccaccgaacatctggtggaaaaaggattcgaggccatcctgtttctcagcgaaccgctgggctcggtgaatacccgtcgcgagcgcctgagcgcctttcgcgccacgcttgcccgccaccacggcgtggtggccgaaaacgccgaggtgcagcttaacgacggcgcgatgctggacaacgtcctgcgtcagttccatgcccgccaccgcgggatgcgcaaagcggtcatctccgccaacggcgcgctgacgctgcaggtagcccgcgccctaaagcgcgtcggcctgatctgggggagcgatatcggcctgctgggcttcgacgaactggagtgggcggagctggccggcgtcggtattaccaccctcaaacagccgacgtggcagatcggctacgcggcggtcgaacaggttattcggcgcattgccggcactaacgaccccatccgcgaacgggtattttccggcgagcttatcgtccgcggatcaacctcccgttaacgatccttcgtgatgccgatcataaattaaacatctcgccctttcttatggaaccgataccatctagcgtattaaggagattaagcaacaaacgccgggagtaagagcgcgatggccagaaaaattattgtcgttaccgctgcgtatggtaatgaccatgttaaatccttaggcgggcaggccgccgtcctgccgtttatcgccaacgccggcgcggacggcgtcgaaatccgccgcgagctgtgcagcgcggaagaactcaacgctctgccctcgctggcggccaccattgagcgccacggcctgctggcctgctactccgcgccgcaggcgctgttcaccgacaacggcgagcttaacccggatctcccgacgctgctcgcggaagcgcaaaccctgaacgctctgtggctgaagctctcccttggccatttcctccacaatcagcagttggatgagctgcgcgatatcctcagcgacagcggcatggcgttggtggtagagaatgaccagaccgactgcggccagctggcgccgatgcagcgcttcaaagccgcctgccgggtccatcagctgccgatcaccttaacgtttgatatgggcaactggctgtgggttggcgattcgccggaagaggcggcacgtcatcttgcgccggcagtcagctatattcatgttaaagcggcggagcctcatcatgagaaattccgcgctgtaccgccggatcaggccgccgaacgctggctggccctgctcgataatcttcccgccgacgcgccgcgtggaatcgagtttccgctgactggccatgacctgacggccgtgacccgccgctacgtcaacctgttacgcgaggattaagtcgtggaaaatttagatgtcatcaccatcggcgaagctatggccatgtttgtcgccaccgaaaccggggatctggccgaggtggagcatttcatgaaacgtgtcgccggcgccgagctgaacgtcgccaccggcctggcgcgcctgggtctgaaagtcggctgggtgagccgcgtcggcaacgacagctttggccgcttcgtactgcaatcgctggcgaaagaggggatcgatagccacgctgtggccatcgacaaccgcttcgctaccggtttccagatgaaatcgaaagtcgaaaatggaaccgatcccattgtggagtatttccgcaaaggatccgcagccagccatctttcgccggacgattttcgcgccgactacttcaccagcgcccgccatctgcacctaagcggcgtcgcggcggccctttctgagagctcttacgcgttgctggagcatgcggcgaaggtaatgaaagccgaaggaaaaaccctctctttcgaccccaatctgcgcccggtactgtggaaaagcgaagccgagatggtggagaaactcaaccgtctcgccttccaggctgactgggttttgccaggcttgaaagagggcgtgattcttaccggccagcagaccccggaagggattgccgatttctatctctcccgcggcgtcaaggcggtagtcattaaaaccggctgcgacggcgcctggttcaagagcgccagcggcgaacagggaacggtcgatgccattaaagtcgataacgtcgtcgataccgtcggcgccggcgacggctttgccgtcggggtgattagcgccctgctggaaggcaaaaccctgcttcaggcggtgaaccgcggcaataaaatcggttcgctggcgattcaggtccagggcgacagcgaggggctgcccactcgcgacgcgctgggcgagtaacttttctacgcaacgataacagccgtcctgtaccctacctgcagcgcggcacagcagcgtccgtttcgacggacgtatgtctcctcattgacagaggcaagcctatgaatagctcaacaaatgcaacgaaacgctggtggtacatcatgcctatcgtgtttatcacgtatagcctggcgtacctcgaccgcgccaacttcagcttcgcttccgcggcaggcattaccgaagacttgggcatcaccaaggggatctcctccctgctgggggcgctgttcttcctcggctacttcttcttccagatccccggcgctatctatgcggagcgccgcagcgttcgcaaactgatctttatctgcctgatcctgtggggcggttgcgcctccctgaccggtattgtgcataatatcccggcgctggcggcgatccgctttatcctcggcgtcgtcgaagccgcggtgatgccggcgatgcttatctatatcagcaactggttcaccaaatcagagcgctctcgcgccaacaccttcctgatcctcggtaacccggtgacggtcctgtggatgtcggtagtctccggctacctgattcaggccttcggctggcgggaaatgttcatcatcgaaggggtgccggcggtgatctgggccttctgctggtgggtgctggtgaaagataagccgtcgcaggtgtcctggctggcgcagagtgaaaaagcggcgctgcaggaacaactggatcgtgaacagcaaggcatcaaagcggtgcgtaactatggcgaagccttccgctcccgcaacgtgatcctgctctgcgcgcagtattttgcctggagtatcggcgtatacggctttgtactgtggctgccgtcgattatccgcagcggcggtgaaaatatggggatggtggaagtgggctggctctcttctgtcccgtacctggcggccaccatcgccatgatcgtcgtctcctgggcctcggataaactgcaaaaccgtaagctgttcgtctggccgctgctgctgattggcggactggccttcatcggctcctgggcggtcggcgccaaccacttctgggtctcctacaccctgctggtggtggccggggcggcaatgtatgcgccttacggccccttcttcgccattattccggaaatgctgccgcgcaacgtcgccgggggcgccatggcgctgatcaacagcatgggcgccctgggctccttctgcggctcgtggtttgtcggctacctgaacggcgccaccggcagccccgcagcgtcctatatttttatgggggtagcgcttttcgcctcagtatggctgactttgattgttaagcctgctaataatcaaaaccttccacttggcgctcatcacgcctgaacgactcatactacggagattcgcatgaagccgtctgtcattctctataaaacgcttcccgacgacctgctacagcgtctggaggagcacttttccgtcacacaggtgaaaaacctgcggccggagaccgtttcgcagcacgctgaggccttcgcccaggctgaaggcctgctgggctccagcgaaaaggttgacgccgcgctgctggagaagatgccgaagctgcgtgcgacctccaccgtttccgttggctatgacaacttcgacgtcgaggcgctgaacgcccgccgggtgctgctgatgcataccccgaccgtgctgaccgagaccgtcgccgatacggtcatggcgctggtgctgagtaccgcgcgtcgggtagtggaagtggcggagcgcgtcaaagcgggtgaatggacgaagagcattggtccggactggttcggcacggatgttcaccataaaaccttaggcatcgtcggcatgggccgcatcggtatggcgctggcgcagcgcgcccacttcgggttcggcatgccgatcctgtataacgcgcgtcgccagcatccgcaggcggaagaacgcttcaatgcccgctattgcgatctcgataccctgctgcaggaggctgactttgtctgcctgatcctgcccctgagcgaagagactcaccatctgttcggtcaggcgcagtttgccaaaatgaaatcttccgccatcttcattaacgccgggcgtggcccggtagtggacgagcaggcgctgatcgccgccctgcagaacggtgagatccacgctgccggtctcgatgtgttcgaacacgaaccgctggccaaggactcaccgctgctgagcctgccgaacgtcgtcgcgctgccgcatatcggctccgccacccatgagacgcgctacaatatggcggcctgtgcggtggacaacctgatcgacgccctgaacggcaacgtagagaaaaactgcgtcaatccgcaggtaaaataagccataaaaaaacccgggtaacggcggcaaccgccctccccgggttctttttgcatcctgtccatcatcctgcccgttcgccgcagccaacgtcagccagatgaagcattaacgggtggcgttcaccgccgccgtccatgcctgattaaacgcctgatgctgcgccgccagcggcccaatcagcgcattgtactggctggcctgctgggaggttgggaactgaatgccgttggcgacaaagctcacctgcgtcccctgctgagcgacaaaatccccaacctgaaccagctgctgggtaaagatctgcgcggccgggatcagcggctgcagcgcgtcggctggcgccgtcaccaccttggcgtaaacctgatcgaagaccggcttgagatcgtcagcctgcttcagcgcgccatgcgcggcatcggcctgcattttcgcattctgcagctgctggcttagcacgcccagcgcgccgttcgcctgacgcagcggctcacgctgggtcatataatcctgcgggacgcggatcgcattgacgctgtccactaccgggcgcagaccagcgtccatcgcctggctcacctgctgcgagtaaccgtagatcaccgcgtagtcagagacaaaaggcccaaactgttttttctgatcggcggtcagcgtcggcagacgttcaccgctacgcatcgccgtattctgcaggaagtcgataaacgctttgcgctgatcgccctctttatcaaaacacccactcaggctaaccaccatcaataaggccgccatagccgcaaaccagcgagagcaggactttcctgtcgccatttttttactcctttcagccaaaaaaagcgcacaacggcacacacgtgccagacgctgacaaggatagtccagctcggcctcgcaggataccctttcctgctaatcttacgcgggaaaaacaccattttgcacgccatcgtcgcgctgtagaacgtctgttatgcgcatcacaaatatggtcttaagaacaggtgggccagaatctcataagccattgatattaatataaataaaaagccacaacccggcactgcgccttaaagcggacgataatcgcacgctttggcacgcgtctggattgcctgcctcgcatttcaatgatttgatgaatgagcgattaacggcgacatgttcgattatcgcacaaatcaaactcaacgacgcgaaggcgacgataataataaacctctgtccctcgctcagtctgccaggaaagccgtatgactaagacaaccatcgacattcaggcctttatcaacgagcaccccttcacccgctaccagtggatgattcttgcgctctgctttatcaccgtcgcgatggacgggttcgataccgcaattatcgggttcatcgcctccgacctggtgcaagagtggggcgtggaaaaatcggccctcggcccggtgatgagcgccgcgctggtgggcctggcggtcggcgccttaaccgcagggccgctggctgaccgcatcggccgcaaaaaagtgctgatcatgtcgatcgtggtgttcggcggattcagcctgctcaccgccttcgccaccagccttaatcagctgacgctgctgcgcttcctgaccggtctgggccttggcgcggcgatgccgaatgccgcgacgctaatgagtgaatatgcgccggagcgccgtcgggcgctgctggtgaacctgatgtttgtcggctttccgatgggatcttcgctgggcggctttttatccgcctggatgatcccgcactatggctggcagagcgtgctggtgctgggcggcgtgatgcccctcctgctggcggtggcattaatattcctgctgccagagtccgtccgctatctggtagtgaagcagcacccggcgcagcgcattgctgctattctgcgccatatcgcgccgctgccgaagacagtggaatttgtactacgcgaagcaggccaggtgaaagagaaatccgcgatcggcgtcattttctctcctcgctacgcggtgggtaccgtgatgctgtgcctgacctactttatgggtctgctgattttctatctgctgaccagctggctgccgctgctcatccgtgaaaccggcgcctcgatgagtcaggcctcaattatcaccgccctgttcccgctcggcggcgggattggcgtgctgatcctcggcgccctgatggacaagatcaaccccaataaagtggtggccgtcggctggctgctgaccggcgtttttgtctgcctggtggggttctccaccagcagcctggcgctaatgggagtgatggtctttatcgccggcagcattatgaacggcgcccagtcgtcgatgccggcgctggcggctggcttctatccgacgcaggggcgcgccaccggcgtcgcctggatgctgggtatcggccgcttcggcggcatcctcggcgcgttcagcggcgccttcctgatgcaggctcagctctcctttgagaccattttcaccctgctggccatcccggcgttcctgtcagccattgcgctgctgatcaagtaccgggtcagtaaatccgtgccggcgacgacagatgaggcgagaagcctgcagaaagcctaaccctataagccggcgccccgcgccggctttgccgcttttttcttatccgtttacaaaaattttcgaagccacctcatcgcgttaataatcattcttttaggctacgctgccgtttggctgtcggggcagattcgatagcctgttggcaaataatcaccgacgttaccatcccttgcgccattttctgactattcttaatgagctatagaaaaatcttttccgctgtgtgataaaaggagttctcaatggaatataaagatcccgtgtttgaactgctgagcagcctggaacacatcgtttttaaggatgataatcagaaacttacctcaaaccgtaagtccactgtatttagtgaatttgaacagctgcgtaaaggcactggacttaagattgacgactttgccaacgtcatgggcgtgagcgtcgccatggtaagagagtgggagtcgagacgggtcagaccgtctcccaccgagctgaaattgatgcgcctgattcaggccaatccacagctttcacgacaattactcgattaatctcgcgcgcagcggcaaaggccagtaagggagcttttgccgctgcaccgtaaaaaaaagtttgctatcaggtgctgaacgtgcgttaatgctcgcaggtttgatgtacagaccacagagcagtcgaatagagcagtccttctaaggttatccaaagatacccccgtagtgaactttccctttatcgctttaaatctgtagtccagacccctacgccgcaaggctcacttatttttttaaaggtaattcactatgtccggtaaaatgactggtatcgtaaaatggttcaacgctgacaaaggcttcggcttcatcactcctgacgatggctctaaagacgtgttcgtacacttctctgctatccagaacgatggctacaaatccctggacgaaggtcagaaagtatccttcaccatcgaaagcggcgctaaaggcccagcagctggcaacgtaacttctctgtaagttcaagccgctaagaatcgagaatccctgcctgatggcggggattttttttatctgtcgccagtagccgccagcataagatggcggctaccgggcattcaaagcagggaaaagtgccagctcgtctcccgccacgccagactatgggtcagcttcagaccttgtaaaaacgcctcatcatgcgacaccaccagcatcgcgccgggaaacgccgccagcgcgctttcaatagcctgcgtcgatgctaaatcgagatggttggtcggctcatccaacaaaagcagctgggcaggctcgcgtcgccagagcacgcacgccagcgccgctttcaggcgctcgccgccgctgagcgccgacagcggcagagtgaccttatccgcgcccagctggagctgcgccaggcgggtgcgcaggaggccctcatccagtggggtatcttccaggctcaggtgcgccattaccgacagggataaatccagctgcgtcagatgttgatcgaggtaagcggcgctcaccgaaagccggacatcgcctgacgcggcctgctccagccccaacagcgttttcagcaaagtggttttgccacagccgtttggcccctttagcgcgatgcgcatcgggccatcgatacgccagttcagcggcgcagccggcgcatggtcgagctgtaatgactccaccaccagcacctgcttgccggcggccacttcgctacccggcagggtaaacatcactggggtctcttcctcaacccgctcccgcgcctgctgcacggcggcattcagactgctgttctgttcacgatgctgacggcgcagcgttcccgggcgctcttttgccgcgcctttgtacttcacgcgttcgaaggaggcgatatttagcgtatcaacggtacgcagcgtctgagccgagcgccgctgggcggcgtcatgctccttatgcattcgcgcgcgggtgcgccgtcggtcggtcacggcatgctccagcgccgcgcgcgcggcctgctgctccgccatacgctggcgctgatattcatcatagttgccgccgtagctgcgcagcgccgtcggcgtcagctcaattatcctcggcatccgcgtcagcagctcgcggtcgtggctggcgatcagagccccgccctgccagctttccagttggtgatagagccactcccgcccctggcggtccagatggttggtaggctcatccagcagcagataatcggcgcccgagacgaaggcgccgcacagcagagccttcatccgctcgccgccgctgagtgaaaatgcggggcgatcggcagagaacggcgggagatcggcttcacggaacgctaaactcaggcgatcggtgagatcccagtgaccatctaacagatcgaaatcgtcggccagcccttggccctgttcaaggcgagacaaggcggcaaaaaccgacgcatagcccagcagcgtagcgagggtggtctccggcgtgagcgtcggctgctgcgctacccaggcaacggcggcggcgcgctcaatatggccgccggcaggagaatcaaggcccgccagcagacgcagcagacgcgtcttgccgacgccgttccggccgaccaggccgcaaagggacggttccagcgagacgctgagcggaccaaacagggtctgtcccgtcgcaaactgacaggtgacctgatgtaaaacaaaagcggggatgcgggcgcaatgagccataagcactcctgaatgaaatcaatactcccctacccgcaaggtatgcgaggtaaggcgtgaaattcatcagtcgtgtttgttcatttgtggggcgcgctccggtgagacgagggattcgtcgggacataggatagccacactccggtatgcgttgcaagcctgttttattcaacgatcttgtaaaaataaaaaggcctcctgatatcaggaggcaaatgatttatttggtgaacaatgaaagggtgcattgagaatgcctgacaccgcaagcatggtggggatagatccccaccagatgctcttactgtttaatatcacaggctaagaatgccaccagctcaatatttccctgcctgcgctgtaattcacatagcgaatcacgaaccatccaggtcaataataaaatagtgaagcaaatcactactaagccaaacaacagatacttttgcggcattcctcgcctccagtgttgattttcaacaagtaagaggctactcttatggtgttcatgcataggggagcctcactttgattactatcaggtggggcttttctctgtctgtctcccgctgaatacctgagacacacagtctcaagcacccgccgccattctagcgtaaatacctctcagaattatgtttatatattcctaaaacgtttcttctcgatgaatgaaaataatgaagatatcaatgacagaattattaatggttcatctatttatatttcacgtataaaaaaacctgccctgaggcaggtctttattattaccgatacgcttactgcagcagagaaatatccgccacttgcaggaacagttcacgcagtttggacagcagcgtcagacggttgatgcgaacatctttgtcttcagcgttaaccatcacgttctcgaagaactcatccaccggctcgcgcagcgcggccagctcgatcagcgcatcctgataacggcctgcggcgaaatacggctgcagcttgtcgcgcagcaccaccagattacccgccagcttaatttccgccgcttctttcagcaccgaagcgtgaacgatgtcgttcagcgtctcatcggatttcgcgaggatgttagagacacgtttgtttgccgccgccagcgcggaggactcttccagagtacggaagtgcgataccgccttcatacgcgcatcgaaatccgccgggcgggttggacgacgcgccagtaccgcctggatcgtgtcgacgccgtagccttcgtcctgataccaggcacggaagcggcccagcataaagtcgatcacatcatcaaccacgttggcgttggtcagcttctcaccgtacagacgaaccgcttcttcggtcagcgtctgcagatcgagatccaggttcttctcaacgatgatacgcagcacgcccagcgcggcgcgacgcagcgcaaacgggtctttatcgcctttcggatgctgaccgataccaaagatacccgccagggtgtccatcttatcggcaatcgctaccgcgcaggccaccggattagatggcagcgcgtcgccagcaaatcgcggctgatactgctcgttcagcgccacggccacgtcttccgcttcgccgtcatggcgcgcgtagtgcatccccatcacgccctgggtgtcggtgaactcgaagaccatgttggtcatcaggtcgcacttggacagcaggcccgcgcgggttgcgtggttcacgtcagcgccaatcttttcggcaatccaacccgccagcgcctggatgcgatcggtcttgtcgcgcagagtcccaagttgctgttggaacagcacggtttccagacgcggcaggttatcttccagacgttttttacggtcggtattgaagaagaactcggcatcggccagacgcggacggaccaccttctcgttaccggagatgatctgctgcggatctttggactcgatgttggccacgaagataaagttcggcagcagtttgccggcgttgtcgtagaccgggaagtacttctggtcgcccttcatggtgtaaaccagcgcttcagacggcaccgcgaggaatttttcttcgaacttcgccgtcagcaccaccggccattccaccagcgaggtgacctcttccagcaggctttcgctcagatcggcttgaccgccaatcttacgcgccgcctcttgcgcatcagctttgattttggctttacgctgttcgtaatcggcgatgactttaccgcgctccagcaggatctgcgggtactggtcggcatggtcgatggtgaactccggctcgcccataaagcgatggccgcgaatcacgcgatcggacggaataccgaggatagtggccgggatcactttgtcacccagcagcaaagtcaccgtgtgtaccggacgcacgaagtggacgtcagacgcgccccagcgcatcagtttcgggatcggtagcttcgccagcgagctggcaatcatgttcggcagcagcgcttcggtgctttcgcccttcacatgggcgcgatacagcaaccactcgcctttgtccgtggtcagacgttcggcctgatcgacggtgataccgcagccgcgcgcccagccttcggccgctttgcttggcttgccttcggcatcgaacgcctgggcaatagccgggccgcgtttttccacttcgcgatcggcttgcgccgccgccaggttggccaccttcagcgccagacgacgcggggcggcaaaccattccactttaccgtgcgcaaggccagcgttatccagctccgcggtcacattcgcagcaaaagattccgccaggctgcgcagcgcttttggtggcagctcttcagtgccgatttccaccagaaaagtattctcagacatggccgcctcttatttattcttgttgcacatcgggaagccgagcgcttcacgggaagcgtagtacgcttccgccactgctttagtcagggtgcgaatgcgcaggatatagcgctgacgctcggtgacggagatggctttacgcgcatccagcaggttgaagctgtgagccgctttcagaatacgctcgtaggccggcagcggcagcggggtctccagcgccagcagctgctgggcctctttctcatactgttcgaagcaggtgaacaagaagtcgacgtcggcatattcgaagttataggtggactgctccacttcgttctggtggaacacgtcgccgtaggtggttttccccagcgggccatcgctccagaccaggtcatagacgctgtccacaccctggatgtacatcgccagacgctccagaccgtaggtgatctcgccggtcaccggcttacactcgaggccgccgacctgctggaagtaggtgaactgcgtcacttccatgccgttgagccacacttcccagcccagaccccaggcgcccagcgtcgggttttcccagttgtcttcgacaaagcgaatgtcgtggatagtcgggtccatacccagctctttcagcgacccgaggtacagctcctggatgttgtccggagagggtttaatcaccacctggaactgatagtagtgctgtaaacggttcgggttttcgccatagcggccatcggttggacgacgggaaggctgcacgtaggcggtcgccatcggctccggtcctaacgcgcgcaggcaggtcatcgggtgagaggtgccggcgccgacttccatgtccagtggttgaacaatggtgcagccctgacgagcccagtaatcctgtaaggtcaggatcaggccctggaaggtcctggtatcaaacttttgcatatgatttcgtgctggatacgtgtggatttaaaggaaggagtcagtatacccgctggctgcgagatatacagtacgaaacggcgttgtttcaggaaaacggacgaaatttacgccaggcggggtcgattcagcgcatcgaaagatgcataaactggccgtccgggtcaaaggaacagatgaaacgctcattcttgccggtacggccagaaagctcatagctcgcctggaattgttcaaagtggttcacgtcaacgagctgcgtttgcgtgttatagcggatagccgcctgatccttgcaaagctgcgccatattgagcgtggtttgcggcgtaatacgagcgcgctgcgctttttgcgtcggcggggagacggtctcgctgcagcccgcgaggagcagcaccagcatgacggaaacaacacctttcaccacgttctcctccaccgccttgttagcaagttgttatcctaaagattcagtattacaggtattttgcgaatatcatgaaactgcgacaagtctgtgaccgaaaactcagactaatctattgcgacaccgggaaaccgggcaggtcatatcttatttctccagcagacattgagggactgatgcaagaaaagatacactggatcaccaacctgcgcggcatcgcctgcatgatggtggtgatgatccacagcaccagctggtatatcactcacccccatgcgattaccctgctgcaatgggatatcgccaatctgctcaattccgcctcccgcgtcagcgtgccgctgttttttatgatctcgggctacctcttttttggggaacgcagcgcccagccgcgccatttctggcggattggcctgtgcattgcgttctatagcgcgctatctctgctgtatatcacgctgtttacccatatcaacgtcgagctgtcgttaaagaatttgctgcagaagcctgtcttctaccacctgtggtttttctttgctatcgccgtcatctacctgctctcgccgctgattcaggttaagtccaccagtagcacaatgctgctggcgctgatggcgatcctcggcattctggccaaccccaatatggtcagcgttaaagccgccggaattgagtggctgccagtcaacctttatatcaacggcgacaccttctactacgtgctctacggcgtgctgggcagagccattggcaccctggacaccgataaaaaatggctaacaccgctctgcgccgcgctgttcatcgccgccgtgtgggtcatttcccgcggcacgctgcatgagctgcgctggcgcggagacttcggcgacacctggtatctctactgcggaccggcggtgtttgtttgcgcggtcaccctgctgacgctggccaaaaactggcttaacgcgcgtcccctgcccggtatcgcctgcattgcgcgacattcgctggggatctacggctttcatgccctgatagtgcatgcgctgcgcgccagccatctggagctatcccgctggccgctgctggatattgtgtggatatttagcgccgccctgctcggcagcctgctgctgtcaggcctggtgcagcggattgatagccgccggctggtcagctaacggtccgccgcccggaggggcccgacttacgtctcaggcccctcttccgtcacgctgagaggttcccgtaagcgcgtcgggtcccagacatcacgcacgtttttctgtaccgcaacagcgccaaacaggctcaaaaaatacgccagcccatagaaccctttctcgctgagcagcagagtggcattccacagtccgataaccagcagacctacagcgataacgaagatcaccagacaggtggtgtagtacagcgcggtggtcggaatggcttcatacttatcgcgcaccgtcttttgataagatgccgcggcaaacagccccagtaccaggacggcaaaataatagcctttctcattcaactgcatatcggcattccacagccccaccagataggtgacgatgccgccgatcagggcaatccaggagatcaaatgaaacgcaggagaatacgtcgcgtgcttgttttccatcactttttaccttttacgcgcctcggggcggcgcttattccgttttttgcatcgcgcgggcgatgcgggtccgttcgggggttgccgatgcgccatataagcagacaaaccatgccgcgatatagacggctttttcatgccagtctgccggtacataccaggcgccgaccagcagcaggccgaccgatagcagcagcaccagccggcataaggcaataaaaccgtcgtcctgttcctgccactgactggcgcgctgatgggcgagaacagcaaacatccccatcaccagcacgccgagaaaataccctttgccgctgaacagcgggcaggtccgccagataccgagcagataaaccagcgatcctgtcgccatcatccccctggcaatattgcgttttgtgatcatctcacctccctggtcgacaggggctgattatgaccgactccctcggcgatgcctcagattacgtacgacaaagcggagatttcggaataaataaatacgcatttatggatggatgtagccgggacattcaggaagggaatccgcccggcgctgccggacggactgaggctaagacatcagcggtttcagttgctgataaatctggcggaaggtttcccgctgcggcgcatagtgggccacacggcgatcgtccgggcgatgggcttgttcaagcggcagcggcttcagcagcccggggcggtctgcctcgtcgtgaaccgccagctgcgccagcctggccgcccccagcgccgggccgacatcgcccccggtacggtaatcgagctgcaggccgctgatatccgccagcatttgccgccagtaagcgctgcgcgccccgccgccgataagcgtgatgctctgcggcttgatgccgcaggcgtgcaccacgtccataccatccgccagcgcatagcccaccccttccagcaccgcccgcgccagctctgccggcccatgctgatgcgtcaggccaaaaaagacgcccttggcctgcgggttgttgtgcggcgtgcgttcgcccgacagatagggcaggaaccacaccggaccggcgctttcatccgccgtctgcgccgccgcgatcagcgccggcacgctggcgagaccggttaattttgccgcccagtccagacaggaggccgcgctgagcatcaccgacatcaaatgccagcggcccggcagggcatggcagaagctgtgcaccgcgctttcgggtttgctaaggaacccttcactgacggcgaagtagacgcctgaggtgcccagcgacagcatcgcctgaccggcatcggccatgccgaccccgaccacgcccgcggcgttgtcgcccccgccgcccaccaccagcgccggcggcatattccacgcctgcgccacctcaggtcgcagttgcccggtgacgtcgctgccttcgaacagcgctggcatcgcatcccgactgagatcgcaggcggcgagcatctcgtcgctccagtcgcgccgggcgacgtccagccacatcgtgccggcggcgtcagacatatcgctggcgagctcgccggtcatgcgcaggcgcagataatccttgggcagcagcactttatcgacctggctgaacactgccgcctcgtggcgctgtacccataagagcttcggcgccgtaaagcccggcatcatcaggttgccggtgatctgcctggaagcgctgactttgtcttccagcagctggcactcttcggcgcagcggccgtcattccataaaatggccggacgcagcacctgtaacgatttatccagtagggtggcgccgtgcatctgcccggcaatgcccagcgccttcacgtcgcgcaggctatgctgcgcgcccagggctttcatcgccgtgtccgtcgccagccaccactgttcgggatcttgctccgaccacagcggatgcggacgcgagacggtgagtttttcggtatgcgatgccactacctcaccctgctcattgagcaggatggctttgacgcccgacgtccccagatcgatgccgatatacatactccctctccttaaacgcgcgccacggctgagcgtggcgcgaacagagcatcctggttgcggcgccggtcaccccgggcgccgccgcatgattacttgtcaaacagataatggttgaccaggttttccagttgttcctgctggccgctgcgatgctgcggcgccagctgatgctgagcggcatactgggcaatatcgctcagggtcatctgcccgttaaggatctgctgccccagctcaccgttccagccagcgtagcgtctggccacgcgcttatccagttcgccgtcctcgatcatccgcgccgcgaccttcagcgatagcgccatggtatccatcgcgccaatatgaccatagaacagatcgtatttgtcggtgctctgccggcgcactttcgcatcaaagttgagcccgccggtggtgaagccgcccgctttgaggatttcatacatcaccagcgcattctcttcgacgctgttcgggaactggtcggtatcccagcccagctgcggatcgccgcggttggcgtcaacggagccgaacagccccagcgcgatggccgtcgcaatctcatgatggaacgaatgaccagcgagcgtcgcgtggttagcttcaatattcagtttaatctctttttccagaccaaactgtttgaggaagccgtaaacggtagaggcatcatagtcatactgatgcttggtcggctcctgcggtttgggctcaatcagcagcgtgcctttaaagccgattttatgcttatgctccaccaccagctgcataaagcggccaatctgctcacgctcctggcgcaggtcggtattcagcagggtttcatagccctcgcgaccgccccacagcacatagttttcaccgcccagttgatgggtggcattcatggcggtgaccacctgggtggccgcccagctaaatacttccggatccgggttggtggccgcgccggcgccgtagcgcgggttggtaaagcagtttgcggtcccccacagaagcttcacgccgctctgctgctgtttctcagccagcacctcgaccatccgggcgaagttattgctgtactccttgagcgaagcgccttccggcgagacgtcaacgtcgtggaagcagtagtaaggcacgttgagtttatggaagaattcgaacgccacatcggctttgcgtttggccatctccagggcatcgccaggctgctgccagggacgatcaaaggagcccacgccaaacatatcggcgccattccagcagaaggtgtgccagtaacaggccgcaaaacgcagatgatcttccatccgtttgcccagcaccagttcatccgggttgtaatgacggaaagccagcgggttagtggatttcgggccttcgtaacgaacgcgatcgagttgatcgaaataggtctgcatagagaactccatattcagagatgcggcgaataaccaatcagataccctaaataattcgagttgcaggaaggcggcaggagcgcaagtccccggtaaccaggggcggagcaacgaatgtcaccaacccacctacaacttgaagtatgacgggtttaagccaatatagaatttcgctttcattttcctcaattacgttatttcacaccgccattgagagaatccacaaacgtgcgccagctcgcaaaaataatatccagtcgccgttgcgccgctctgtcagagacagtccagtgcaataataagagcgtgcatgaataaaatacgatcgccgtcataatttgcacattaaacgaaatttcataacggcaaaataagaaccggtaattgccagccctgctttccgcgttaagaatctgtaacgtatccgcaacctcatgtatcaaacattattttccgttcgtcttacctacccttacaaaaaaggtatcgttattatgaagataaagaacctttgccttacgctttgcgccagctccctcctgctcgccagcatggcggggatggcgaaagaagtgaagattggcatggccatcgacgatctgcgtctggagcgctggcagaaagaccgtgatattttcgtcaataaagcggaatccttaggcgccaaagtttttgtccagtccgctaatggcaatgaagaaacgcagatgtcgcaaattgaaaacatgatcaaccgcggcgtcgatgtgttagtcattattccttataacggccaggtactcagtaacgttattaaagaagccaagcaggaaggtattaaagtcctggcctatgaccgtatgattaataatgccgacattgatttctatatatctttcgataatgaaaaagttggtgaaatgcaggcgcaaagtctggtcgacaaagtgccgcagggtaattatttcctgatgggcggttcgccggtggataataacgctaaactgttccgcgccggacagatgaaggttctcaagccgtatgtcgatgatggcaaaattaagattgtcggcgatcagtgggttgacggctggctgccggagaacgcgctgaaaataatggaaaacgcgctaacggcgaataataacaagatcgatgccgtggtcgcctccaatgacgccaccgccggcggcgccatccaggccttaaccgcccaggggctggccggcaaagtggcgatctccggtcaggatgctgacctggcgggcgtgaagcgcattatttccggtacccagacgatgaccgtctataaaccgattaccaccctggccaccaacgccgctgaaatcgccgttgagctgggtaacgataagcagccgaaggccgataccacgctgaataacggcttaaaagacgtcccttcgcgcctgttaacgccaattgaggtgaataaagaaaatatcgacgccacggtgattaaagacggtttccataaaaagagtgaactgtaatggctgacgccccgctgcggggcgtcattttcatcccgccggatatcactgttgcggagtctttatgacctggctactcgaaatgaagaacatcaccaaaaccttcggcgctgttaaagccgtggataacgtcagcctgcgcctgaacgcaggcgaggtggtctcgttatgcggtgaaaatgggtcggggaaatcgacgctgatgaaggtgctgtgcggtatctatccgcacggaagctatgagggcgagattatttttgccggcgaaacgctgcaggcaaaccatattcgcgataccgaacgcaaaggcatcgccattattcatcaggagctggcgctggtgaaacatctcaccgtgctggagaatattttcctcggcgccgagatctcccgccatggtctgctggattatgaaaccatgacgctgcgctgtcagaaactgttggcgcaggtcaatctgcccatttcgcccgatacccgcgtcggcgacctcggccttggtcagcagcagttggtggagatcgccaaggcgctgaataaacaggttcgcctgctgatcctcgacgaaccgaccgcctccttaaccgaacaagaaaccgcgacgctgctggcgatcgttcgcgatctgcaaaaccacgatatcgcctgcatctatatctcgcataagctcaatgaggtcaaagcgatctccgatacgatctgcgtgatccgcgacggccagcacatcggcacccgcgatgccagcggcatgagcgaagacgatatcatcaccatgatggtcggccgcgagctcaccgcgctctatcccagcgagccgcacgcccacggcgaggagatcctgcgggttgaacatttaaccgcctggcacccggtaaaccgccatattaaacgggtcaatgacgtctcattttccctgcgtcgcggagaaatcctcggcatcgccgggctggtcggcgccggacgtaccgaggcggtacagtgcctgttcggcgtctggccggggcgctggcaaggggagatcgttattgatggccagccggtgagcatctctaactgccagcaggccattgcccacggcatcgccatggtgccggaagaccgcaaaaaagacggcatcgtgccggtgatggcggtgggcaaaaacattaccctcgcggcgctcaaccagttcaccggcgcaatgagcagcctggacgacgccgccgagcagcactgcattcagcagtccattcagcgtttgaaaattaaaacctcctcgccggagctggcgattggccgtctgagcggcggcaaccagcaaaaggcgattctggcgcgctgtctgctgctcaatccgcgcattctgatcctcgacgaacccacccgtggcatcgatatcggggcgaagtatgaaatttataaactgattaaccagctggtgcagcagggcatcgcggtcattgtcatttcatccgaactgcccgaggtgctcggtctcagcgatcgggtgctggtcatgcacgaaggcagactaaaagccaatttggttaatcaacatctgacccaggaacaggtgatggaagccgcgctgaggagcgaacgccatgtcgaagaacacgtcgtctgaaatcaaactcaccccaaccgcccccgcggccctgccggcgctgaaggggctgaatctccaggtcttcgtgatgatcgccgccatcgtcgtcattatgctgtttttcacctgggttaccgatggcgcctacctgagcgcacgcaatatctccaacctgctgcggcagacggccatcaccggcattctcgccgtcggcatggtgtttgtgattatttcggcagaaatcgacctctccgttggctcgatgatggggctgctgggcggcgctgcggcgatctttgacgtctggctcggctggccgctgccgctcaccattctggtgacgctggtgatgggcctgctgctcggggcgtggaacggatggtgggtagcctatcgcaaagtgccctcgtttatcgtcacccttgccgggatgctggcgtttcgcggcattctgatcggcatcaccaacgggaccaccgtctcgcccaccagtccggcgatgtcgcagatcggccaaagctacctgccagacggcatcggcttcggcatcggcgttgtcggcatggcggtgtttatcgtctggcagtggcgcgggcggatgcgccggcaggcattaggtctggcgacctcgtcctccaccgccgccgtcggccgccaggccattaccgcggtgattgtgctgggcgcaatctggctgctcaatgactatcgcggcgtaccgaccccggtgctgatcctcgccgccctgctgctggcgggcctgtttatggccacccgcaccgcctttggtcgccgcatctacgccatcggcggcaacctggaggcggcccgtctgtccgggattaacgtcgagcgtaccaagctggcggtgtttgccattaacggcctgatggtcgccattgccgggctaatcctcagctcacggctcggcgcggggtcgccttcggcgggcaatatcgccgaactggacgccatcgccgcctgcgtcatcggcggcaccagcctggcgggcggcatcggcagcgtcgccggggcggtaatgggggcgtttattatgtcggccctggataacggtatgagcatgatggacgtcgccaccttctggcaatatatcgttaaaggcgccattttgctgctggcggtgtggatggactctgccaccaagcggcgcgcataaggagagactctctgaagaatgtctgaattctttgcgctaccgccaaacttcgccataaggcgcttgaaatatctcgggcattagccggtagtgtatacccaacatcattcgggttgcagacggcgcccccggccgcgtaccggcgtacgtggccgggatgagtggtaagtcaggccatcggcaacatcttgaatgaaggggtatgaccggggttagagcaggaacattatctatgtttgaaaagcgtcaccgtattacgctgttatttaacgccaacaaagcttatgaccgccaggtagttgaaggtgtcggcgagtatctgcaggcctcccagttggaatgggatatctttattgaagaggactttcgggcacgcatcgaaaacatcaaagagtggttgggcgatggcgttatcgccgactatgacgatcccgaaatcgaaaagctgctggccgatgtccacgtgcccatcgtcggcgtcggcggatcttatcatcagccagagcagtacccgccggtccactatatcgccaccgacaacgccgcgctggtggaaagcgcttttctccatttgaaggaaaaaggggtgcaccgcttcgcgttttacggactccccacctccagcggtaaacgctgggcggtagagcgcgagtatgccttctgccagctggtcgcgaaggagaagtatcgcggcgtggtctaccaggggctggagacagcgccggagaactggcagcacgcgcaaaaccggctcgccgactggctgcaaaccctgccgccgcaaaccggcatcatcgccgtcaccgacgcccgcgcccgccacgtcctgcaggcctgcgagctgctgcatatcccggtgccagagaaactgtgcgttatcggcatcgataacgaggagctaacccgctatctctctcgcgtcgccctctcctctgtcgcccagggcacccgccagatgggttatcaggcggcaaaattactccaccggctgttgaataacgaggccctcccgctgcagcgccagctgatcccgccgatgcgcgtcgttgagcgacgctccaccgactaccggtcgttaaacgatccctccgtgatacaggcgatgcattacattcgcaacaatgcctgcaaaggcatcaaggtggaacaggtgctcgacgccgtgggcatctctcgctctaatctggaaaaacgcttcaaagaggaggtcggggagaccatccacacggtgatccacagcgaaaaactggaaaaggcgcgcagcctgctggtgtccactagtctgtcgatcaatgagatttcgcagatgtgcggctatccgtcgctgcaatatttctattcggtgtttaagaaggagtacgacgtgacgccgaaggagtaccgcgatcggcacagcgaggtgatgctgtagggtaaaaaaatgcccggcgacaaggccgggcatccggattacagatgagcggcgatgagccgctgattgtcctgatacatcgcgaagagatagttgttgtagctcgaccctttggtcgaataccccttcagcttatggatcatggtgctggcagttacttcctgatccgccttgcgcagctgcaggcgcgacttgcggaaagaagaataggccgggtgggtgttcaggtttgttacgtaagcctgcaccgactgctctaccgactcaaactgcgagtaacctttcatcgcgccgcggcagcgaccggcgccgcacttcatgccgaacaggttgttattctcgcgcgccagcctggaggtaccccagccactttccgccgccgccatggtcgccaccatgctgttcggaataatgtcgacacgctcaagcagcgcgttccagggcacatgacgcgtattgcctgaccacttcaccttataacgggaagcgatatccttcaggcgcgccttctcagtcggtgaccagcgagcatcgtactgcttggaaataagccagttacgatccgcagtaatcgcctgattctgcttggtaatataaggcatgaccgtccggagaaacgcttttttccttggtgttccggaagggtattttcgcaagtcaggaagtgaactgctctttacactattgcgagaatactcttgtttactgcttaccttagtactacttatcttctttaccgttggggctttatgactctttgtcgctgtgtgcgttgtcgccaacacactacctgaaaagatgcaggttagtaacataagtatggcggccccatatcgtcgtatgggattcgatatcatcaggtctcctggtcggatatatgcattccaacaccttgtttttcacaaaaaaacgatagctgaatcgctaatagtatcaaaaatacgcactgagggcatcaacagaaatagtccaattccgaattgctgtcatctgaaatcggtttctgcggcgcatcgccagcgcgaaaatgctagcttcgtctcatttttagcctattttttgagcggtgtcactcaccccttttcatcctcctggtaaaacgcgcgtcaggaggagttcacccgcgcggcgacaaggcacactagataaaaaccgctcacaggatctcgcaatgaaactcgctgcgcttgccacgttattcgtgcctgggatggcttttgccgcctggactaccaccgactttcctgcttttaccgaagaagggaccggccgattcatcagccagaaagtggttgagaagggtacacgtcccctgcagctaaattttgaccagcagtgctggcagccttccggcggcattaagctcaaccagatgctgtccatggagccctgtcgcggcacaccgccgcaatggcgcatcttccgccagggtctgtataccctggaggtggatacccgttccggcacgccaacgatgatgatttcgctggaggaaaaagagaccagcgccgcggcgccgcagatccgccagtgtccgaagtgggacggaaaaccgctgaccatcgacgtcagcaaaaccttcgccgagggcagcaaggtccgcgatttctacagcggcaatgtcgcgaccgtcagcggcggcaaaatcaccctgcagcccgccttcggcagcaatggactgctgctgcttgagcgcgccgagaccgccgccccggcgccgtttgactggcacaatgccaccgtctacttcgtcctgaccgatcgcttcgtaaacggtaacccggccaacgacaacagctatggtcgccataaagacggcatgcaggagatcggaaccttccacggcggcgacctgcagggattaaccagcaagctggattatctgcagcagatgggagttaacgccctgtggatcagctccccgctcgagcagatccacggctgggtcggcggcggcacgaagggcgatttccctcactacgcttatcacggctattacacccaggactggtcgaaactggacgccaacatggggaccgaagcggatctccgccgactggtggatgaagcgcataagcgcggaatacgtattctgttcgacgtggtgatgaaccatgccggctacgccaccctggccgacatgcaggagttccagttcggctccctgtatctgcaaggcgatgagctgaaaaaaactctcggcgagcgctggacggactggaagccgggcgcgggacagacctggcacagctttaacgactatatcaacttcagcgacaaagccgggtgggagaaatggtggggtaagaagtggatccgcaccgatatcggcgattacgacaatccgggctatgacgatctcaccatgtcgctggccttcctgccggacctgaaaaccgaatcgaaggaggtctcaggcctgccgaacttctatagccataaaccagacaccgcagcgaaagcgatcccgggctatacgccgcgcgactatctgacacactggctgagccagtgggtacgtgactacggcatcgatggcttccgcgtcgataccgccaaacatgtggagatggacgcctggcagcagttaaaaacccaggccaccgccgcgctggcggagtggaagaaagccaatccggataaagcgctggatgcggcgccgttctggatgaccggcgaagcctggggacatggagtgatgcagagcgattattatcgccacggttttgatgcgatgatcaatttcgactaccaggaccaggcggcgaaagcggcgacctgtatggccaatattgacctcacctggcagcaaatggcggacaagctgcagagctttaacgtcctgagctacctctcctcgcacgatacgcggctgttccgcgaaggcggcaccaccgcggcggagctactgctgctggcccctggcgccgtgcagattttctatggcgacgaatcatcgcgcccgttcggccccaccggctcggacccgctgcagggtacccgctcggagatgaactggcaggatgtcaacggcaaggcggcccgcagcgttacccactggcagaagatcggccagttccgcgctcgccatccggcaatcggcatgggcaaacagacaacgctgtcgatgtcgcgtggttatgggttcgtgcgtgagagcggtgaagacaaagtgatggtcatctgggccgggcagcagcagtaatccacatgtggctctccgccctgcggggagccaccattcagcacaaaatgctaacaaaatagcaatatacaggataaagataaaaatccgcctcctcccgccgatttgcaccatgccagcgctggcgttatggttagccactttccagaaccaccgatagactattcgcgatgacattttcccttttcggcgacaaattcacccgtcattcaggcatcacccgcttgatggaagaccttaatgacggtctgcgcacgccgggcgctattatgctgggcggcggcaaccccgctcagatcccggaaatgaatgactacttccagcagctgctggccgacatgctggataatggcaaagcccttgatgcgctttgtaattatgatggtccacagggcaaaagcgagctgctggctctgctggcgaacatgctgcgcgacgagctgggctgggagatcgaaccacagaatattgcgctaacaaacggcagtcagagcgcatttttctacttatttaatctgtttgcaggccgtcgggcagatggcaccacccgtaaggtactgttcccactgacgccggaatacatcggctacgccgatgccggtctggaagaggatctgttcgttgccacccggccgaacatcgaactgctgccggaaggccagtttaagtaccatgttgattttgagcatctgcaggtgacggaagagaccgggatgatctgcgtctcgcgccccaccaacccgaccggcaacgtcatcactgatgaagagctgatcaaactggatgcgctggcgaatcagcacggggtcccgctggtgattgataacgcctacggcgtgccgttcccgggcattatctttagcgacgcccgaccgctgtggaatccgaacatcgtgctgtgtatgagcctgtccaagctgggcctgccgggcagccgctgcgggattatcatcgccaacgaaaaaatcatcaccgccatcagcaacatgaacggcattatcagcctcgcccctggcggcatcgggccggcaatgatgtgcgaaatgattaaacgacaggatctgctgcgcctgtcagagacggtgatcaagcccttctattaccagcgggtgcaggaaaccatcgccattattcgccgctatctgccggaggagcgctgccttattcacaaaccggagggggcaatcttcctctggctgtggtttaaggatctgccgatctccaccgagctgctgtatcagcggctgaaaaagcgcggcgtgctgatggtgccgggggattacttcttccctggtctggataaaccgtggccgcacacccaccagtgtatgcgcatgaactatgtaccggacccgcaaaaaatcgaagccggagtgaaaatcctcgccgaagaggttgaatttgcctggcgcgaacaggaagcataatctctgacgccgcgggcgggtaacgttcgtcagcgaccccattcacgccagcgccagccgctggcgtttttgcgcgcatagcgcttccagctccgcgggaaccatcacccgcagcgcctgcgtcgggcaggcggccacgcaggccggtccttcggcgcggtgatggcatagatcgcatttcaacgcctgcgcctgctcgttcattaccgtaacggtcatcgcgccgtacgggcaggccaccatgcagcttttgcagccgatgcagcgccgctggtcgacccaccagacgtcattgtcgcgctgaatcgccccctgtgggcaaacgctggcgcagggcgcatcctcgcactgccgacaggccatcgccgtcgatatgtcaccgcttttcaccacccggatacgcggcgcgaaatggttcgtcgacagggcggcgacatcctgcgcctgctggtgcgccaccgcgcaggccacttcgcaggtacgacagccgatgcaccgctgggcattggcaataagaaactggttcatcctctgctccctggggataaaaccgcagggtgccagaatatcccctgcccgcgctttgatcctgaatggaatcagcgctgttttttgtcagatggccggcaggatgtggtcatttgcctgacgcttcacgcaccgtgaaacccagctcacgcgaaattgcttcggcggtctcacgtagtggttttaacaagttcttttcgccagctccccggcacgaagtccgccggggagccgacgttaatgattaccggaacaatgccttatcgcgcaggatatgatcgttgccgcgacggcgggtgaagccaatccgatcgaaatactccaggatctggatcgccagcttccgccctacgtttaaggtatcgcggaaatccgccgcgcaggttgaaccgcgcagccgatccagctcgcgcacccgctgggcgaattgcacaatgcgatcgttgcggtagtaacgatccttgacgatcgcggtaatcatcccctgctgcgccgcctggcgcagcaccgcgcgcatcagggactcttcaacatggacttcgcgcgcaagatcgcgcacccaccacggatcgtcgccgaacaaagtctccaccttctgccagaccgcctgctgctcgtcggtaaacccggctttatgctccggcaaatgcagccagccgtgatggctgtggactaagccgctctcgcgcatctgctcaatcagcagcagcaccagcgcttcatcttccatcggcagcgcgatgcggcgcaggcgctcccggccagggcccggctcgtctcgatgctgctcatggtagcgcgcaagggcatccagcaattttcgctgccagcgggcggcaagcggcgcgctaagcaggcgctgtccggcctgcagatagtccggtcgctggatcagggccgccatcccggcttcgctgagctgccgcgcccaggcgaagcgctcaagccggacggcatcccgctgcagatgcagctccagcgcctgcgcatcgtcagcgccgaccgccgccagggcgtgcagccactgcagatattccggtttacgtttgccgcgacgcggaggatccagcgtcaccacccgtgcgcccgccagcgtcaagcgagcggagatatcgcggagcaccagccggtcgttatccgccagccacagcggagtatccagcaccagctccgccaggttgccctcaagaagcgacacccggccggtaatgtggctggcagcatggtgaatatgcagcggctgccactggctgagcggcgtatggcactgcagctcgacaatcacccgttctgctggctccggcggtggtgaggagagcagccagtcgccgcggtgcactgcctctttttgcgcatcgccgacaatattcagcgcaatgcgctgtccggcgtgcgcctgctcaaccgcttgattctgggcatgcaggccgcggacgcgcatcggcgtgttgacgccggtaagccatagggtatccccgacccgtacttcgccggagagcgccgtcccggtgaccaccagccccgcgcctttgacggtaaaagcgcgatccagcgccaggcgaaaccgctgctgctgcgggcgggggcgctccgcaagctgcagcagatggctgcgcagttccgcaataccgatgttttccgccgccgcggtgggaaagaaagcgacggcgtcaaagcccagctcgcccagggtctgctcgacctctgcctgaacctccgccaccctggcggccgccacgcggtccgttttggtcagcgccacggtcagcgtcggctttccggtcagctgcaggatcgccaggtgttcgcgggtttgcgccatcaccccgtcatcgcaggctaccaccagcagcgcatggtcaataccgcccgcccccgccagcatgttggacaaaaacttttcgtgcccgggaacgtcaataaatcccagcacccgcccgtccggctgcggccagtaggcatagccgagatcgatcgtcattccccgcgctttctcttccggcagacgatcggcattcacgccggttatcgcctgcagcagcgtcgttttgccgtggtcaacatgtccagcggtggcaataatcatcgtaacaacatctccataaagcgggtttcatcttccagacagcgcaggtccaaccagagccgaccgtcataaatgcggccaatcaccggacacggcagcgcgcgccagcgggccgccagcgcctccagccggctaccgcggccgtcatgcggggtaaaggtcaacgccgcgctgggcaggcggtcgacgggtaacgaaccgctgccaatctgcgactggcaggctgccacgctgacggcaaagtcagcatagtgtgccgccaggtcaggcagcaggcgttcagccagccggcggatctcttccgccggacgggtgagcaagcgcagcgtcggtaatctctccgtcagcacctccgggtgctgatagaggcgcagcgtggcttccagcgccgcgagggtcattttatccgcgcgcagggcccgcttcagcggatggctttgcagccgggcaatcagcgcgcgtttgccgacgataattccggcctgcgggccgccgagcagcttgtcgccagagaaactgaccaggctcaccccggcggagatcatctcctgcggcatcggctccttcggcaggccatactggctgagatccaccagcgacccgctgcccaggtcggctaccaccggaacatccagttcgcggccaatggccgccagctccgcttcgtcgacggctttggtaaagccttcaatgctgtagttgctggtgtgaaccttcatcagcagcgcggtattgtcattcaccgcctgacgatagtctttggcatgggtgcggttggtggtacccacttcgtgcagctgacaacccgcctgacgcatcacatcaggaatgcgaaatgcgccgccgatctccaccagttcgccgcgggaaaccaccacttcgcggccgctggcggtggccgccagcatcagcagaacggccgccgcgttgttgttcacgatacaggcatcttccgcgccggtgatctggcacagcagatcggcaatggcgcgatcgcgatggccgcgcccggcgtcgtcgagatcatattcgagcgtcaccggcgcgcgcatcgcgctggcaaccgcctccacggccgactccgcctggatggcgcgccccagattggtatgcaataccgtaccggtgagattaaacaccggacgcagggcgctccgctggccggcggtgagccgctgctcacaggcgtgcagccagtcatggctccagtcaggcagtgtctgacactggcggatctgttcccgcgcctcgtccagcatctggcgcagctgcgtcaccacctgcgaatggccgtgctgcgccagcagggaggaaaaagcggggtcgcggagtaagcggtcaatggccggaagccgggtataaagcgcacgaatttcggtagtcatgaatgggcctggcggtaagttattttcccccctcccgacgggagagggagtcaacaatcagcggcgattgtaacgcctccttgcgcaaactgttacctgcctgggtcaagtccgcggcggttcagtgcgcgcaaagctggcgcgctggaacagcgcatccaccagcttcaccagctgcggccgggtggcgcaccagccgggcgcgacccggcgaaagttcagataagcaatggcgcaggccgtggaaatggtcgccagattaacctcgtcgccgcgcagcgttccgtctgccgcgcaggcttccagcctgtcgagaccgcgagccactttctcccgctggcggagcagttcttgctctgactgttgcgcacccgggcgagccttttcacgcaccagcgcctgggcggcctccatcacgccatccgccagcgcctctagctggcgcatcctgagagcggctctggggtcggcggggatcatcggcggcgctacgcccagcagctccagatactgggcgatgaccggggagtcaaaccagcactcaccgtcgtccgtcaccagcgccggtaccttgcccagcgggttatagcgcgccacaccgttgctttcgctgtagggggattcgttgacaaactcaaaagggatgcgcttttccagcaggatcaccgatattttgcgcacaaagggactggtgtagctgccgatcagtttcatagcctgctccttatcgccaacaaattatcgccaacaaagatatgagtatggctcagggcaggacaaaaggcaggtgagcgtccggctcaacctgccgccgatcgcattaatgatcgacatagaggtagtgcatccagctggtcatccgcagcagcactttacgcatcaccgagacgtgggtgaaatggtcggagtagagcgccacctgcgcgtagataccatcgggtaatgctgatagcccttgttcaagcgatcgcgttccgtcgacacgcgggtggtattggcctggcctcagagagctgcggcttggggacgttaatacagtacagcgtcgttaccaggttggcctgcaggcggtcgactcgcgcctgattgggcgccgggtcaatcgtaaatagcgcctcgcctttctcgacgcgctgagtggctctatcggttcggctttacgggattatttatatgattttattcacaatatactgatattcgccccgctattttgaggataattcacgcctttcatttatgccatccggcgtaaaaaagttattcggcaattaaggttgcttagttacagggtcatcccggcgtggaagcaaaaccgggccgagatcacagcggcgtaaacccctcgcgaaattctttgtgatcaaaatcacaaacaaacaacaaaaacacgaaacaaaaatgtgacaaatatcacacaaaaaggcagatcagcggctaaaaaggcgctgtgttgtttttttacacagtaattttgtgatcatcatcactacaaaaccctcttagccccctatattcatgtgatccaaatcacataaaagggcgctggctggacagctaaacgtttcagtgccagatttcgcactatcaatcagggcccggctacctctgccgccacattaacaacaaacctcgggctttaagcctgcgcgctacgcaaaacagaagaaggggtgttttatgtcatccgatatcaagatcaaagtgcaaagctttggtcgtttcctcagcaatatggtgatgccgaatatcggcgcgtttatcgcgtggggtatcatcaccgcgcttttcattccgacagggtggttgccaaacgaaacgctggcgaagctggtcggtccgatgatcacctacctgctgccgctgctgatcggttacaccggcggtaaattagtcggcggcgaacgtggcggcgtggtcggggcgatcaccaccatgggcgttatcgtcggcgcggatatgccgatgttcctcggctccatgattgccggcccgctgggcggctactgcatcaagaaattcgataactgggtagacggtaagatcaaatccggttttgaaatgctggtgaataacttctccgccggcatcatcgggatgatcctcgccattctggccttcctcggcatcggcccggcggtcgaagttctgtcgaaaattctggcggctggcgttaactttatggtggcgcacgacatgctgccgctggcgtctatcttcgtcgaaccggcaaaaatcctgttccttaacaacgccatcaaccacggtatcttctcgccgctgggtattcagcagtcccacgagctgggtaaatccatcttcttcctgattgaagctaacccgggtccagggatgggcgttctgctggcgtacatgttctttggccgcggcagcgcaaaacagtctgcaggcggggcggctatcatccacttcctgggtggtatccatgaaatctacttcccgtacgtactgatgaacccgcgcctgatcctggccgttatcctcggcgggatgaccggtgtcttcaccctgactatcctcaatggcggtctggtttccccggcttccccgggttccattctggcggtactggcgatgacgccgaaaggcgcctccttcgctaacatcgccgcgattatcgcagcgatggcggtctccttcgtggtctctgcggttctgctcaagaccagcaaagtcaaagaagaagacgatatcgaagccgcaacgcgtcgtatgcatgacatgaaagcggaatccaaaggcgccagcccgctggcggccggcaatgtcaccaacgacctgagccatgtgcgtaaaatcatcgtcgcctgcgacgccgggatgggttccagcgccatgggcgccggggtactgcgcaagaaagtgcaggatgccgggctgagcaacatctcggtcaccaacagcgcaatcaataacctgccgccggatgttgacctggtcatcacccaccgcgaccttaccgagcgcgccatgcgccaggtaccgcaggcgcagcatatttcgctgaccaacttcctcgacagcggtctgtacaccagcctgaccgagcgcctggtcgcggcccagcgccacatcgacaacgaagtcaaagtcaccgatagcctgaaagacagctttgacgatactaacaacaacctgttccagctgggcgcggataacatcttcctcggtcgcaaagcagccaccaaagaagaagccattcgcttcgccggtgagcagctggtgaaaggcggctacgtcgagccggaatatgtgcaggcgatgctggaccgcgaaaaactgacctcgacctatctcggcgagtccatcgcggtaccgcacggcaccatcgaagcgaaggaccgcgtgctgaaaaccggcgtcgtcttctgccagtacccggaaggcgtgcgcttcggtgaagaagaagatgaagtcgcgcgtctggtcatcggcatcgccgctcgtaataacgagcacattcaggttatcaccagtctgactaacgccctggatgacgaaaccgtgattgagcgcctggcgaaaaccaccagcgtcgacgaagttctggcgctgttaaataaataatcaacgctatccaaccctctcctttgggagagggttggggtgaggggaaaggcctcaccccagccctctcaggtgaaaacattaattgaaggttaatactatgaaagcattacattttggcgcaggtaatatcggacgtggctttatcggtaaattgctggccgacgcgggcatcgaactgacgtttgccgatgtcaatcagaccgtacttgatgccctgaatgcccgtcatagctatcaggttcacgtcgtcggtgagaatgagcaggtggacaccgtctccggcgtcaatgccgtcagcagcatcggcgatgaggttgtggacctgatcgctgaggtggatctggtcaccaccgccgtcggtcccgtcgtgctcgagcgcatcgcgccagcgatcgccaaagggctggcgcagcgcaaagcgcagggcaccgaacgcccgctgaacatcatcgcctgcgaaaatatggtgcgcggcaccacgcagttaaaaggccacgtgtttaacgcgctggcggaagaagataaagcgtgggtggaagcgcatatcggctttgtcgactctgccgttgaccgtattgtgccgccatcggcttccgccactcatgacccgctggaagtcaccgtggaaacctttagcgaatggattgtcgataagactcagttcaagggcgcgctgccgactatcccggggatggaattaactgataacctgatggcatttgtcgaacgcaagctcttcaccttgaacaccgggcatgctataaccgcctacctcggaaaactggcgggccatcagacgattcgcgacgcgatcctcgacaagaaaattcgtgccgtcgtgcagggcgcgatggaagagagcggcgcggtgctgatcaaacgttacgcctttgacccgcagaagcacgcggcttatatccagaaaatacttggccgtttcgagaacccgtacctgaaagacgatgttgagcgcgttggccgtcagccgctgcgcaaactgagcgctggcgaccgtttaattaagccgctgctgggtacactggaatacggtctgccgcaccgcaacctggtgaaagggattgcggcggcgatgcatttccgtagcgaagacgatccgcaggcgcaggagctggcggcactgatcgccgacaaggggccgcaggccgcgctggcgcagatttccggcctggatgccgcaagtgatgtcgtcgcggaggccgttaacgactacaacgcggaaaaatgatgcacaacctggcgcggccgacgtcgcgcccattacgactcctgtcagatatgcaggcaatgatggaagaaacacaagcatttgaaaaccgtgtgcttgagcgtctgaatgctggcaaaaccgtacgaagcttcctgatcgccaccgtcgagctgttaacggaagcggtcaatattctggtgcttcaggtgttccgtaaagacgactacgcggtgaaatacgccgtcgagcccttgctggagggcagcgggccgctcggcgatctctctgtacgcctgaagctgatttatggccttggggtgataagtcgtgccgaatatgaagacgctgagctgctgatggccctgcgcgaagagcttaaccacgacggcaatgagtacagctttaccgacgacgaaattatcggtccgttcggcgagctgcactgcgtcgccgccctgccgccaacgccgcaatttgatgacagcgatgccgaactgctggcaatgcagaaactgcgttaccagcagatggtgcgctcaacgatggtgctgtccctgactgagctgatttcacgaatcagcttaaaaaaagcctttcagaaatcaacgctctgattccggttccgtctggtcgcaggtcggccggtaaagctgacgataatattccagacgctgcaggaacaacgcttccttatcctgaggaatgtctcgcggtacatgctgcagacgcggagactttttcaaatactccataaacgcctgactggaagccataaaatcaaccgctttgtcgattaaacgtggtacgccgtcgccgatctttgccatcacgtcctccttttgggaataatctgattaagcattagccaattcaccagcgtgggttaaggaaaacgtgcttatctgccgacaggcttcacagaaatgaaattagaacgggtattaggcggaatattaataaaattcaaattattagcgataaatgatattgcattccgcgggcgacaaacggcgaatttttgataaatagctatcaacaatagcggtcacggcacatactataggcgaatgaagcccctttattaacagatcaaaccaccatgaaagaagtcgaaaagaatgaaatcaagcgtctgagcgatcgtctcgacgccatccgccaccagcaggccgagctgtcgctggtggaagccgccgataaatatgctgaactggaaaaagaaaaagccactctggaaacggagattgaacgtctgcgttccgtccagagccagaagctgagcaaagaggcgcagaagctgatgagcctgccgttccgccgcgcgattaccaaaaaagagcaggccgatatgggcaagctgaagaaaagcgttcgcggcctggtggttgtccatccgatgaccgccctgggccgggaaatgggtctgaaagagatgaccggtttcgcccgcagcgaattttgatacccagccctctccgtacggagagggctattctgtcttcactcccccacatttttaccttcagccgggtcgattggtccaaccaataatttcatccaccccctggcagttcacaaatccgtcaaaacccatcacaaacacgttgcttaagagtaacatctgattaaccattcattgtcatcaaccctgatacccttaattggacgggccaattttactttcggtgggatcggcaatgagcgcagactcagccctcctctcctggcggcccgatggagaccctgcatgaatctctggcaacaaaactacgatcccgccggtaatatctggctatccagtcttatcgcatcgctaccgattctgtttttcttttttgcgctgattaagctcaaactgaaaggctacatcgctgccacctggaccgtcgcaatcgcgctggtcgttgccttgctgttctataaaatgccggtggaccgcgccttagcctcggtggtctacggcttcttctacggcctgtggcctatcgcgtggattattatcgccgcggtcttcgtctataaaatctcggtgaagaccggacagttcgacatcatccgctcatcgattctgtcgattacgccggaccagcgcctgcagatgctgatcgtcggcttctcgttcggcgcctttctcgaaggggcggcgggtttcggcgcaccggtggcgattaccgccgcgctgctggttggtctcgggtttaatccgctgtatgcggctggcctgtgcctgatcgtcaacaccgcgccggtggccttcggtgcgatgggcatcccgattctggtcgccggccaggtgaccggtatcgatagcttcgccatcggccagatggtgggccgccagctgccgttcctgaccattatcgtgctgttctggatcatggcgattatggacggctggcgcggcattaaagagacctggccggcggtgatagtcgcaggcggttcgttcgctattgcccagtacctcagctcgaacttccttggcccggagctgccggatatcatctcgtcgctggtctccctggtctgtctgaccctgttcctcaaacgctggcagccggtacgcatcttccgcttcggcgatctcggcgcctcgcaggtggatatgacgctggcccgcacacgctacacggcgggacaagtgatccgcgcctggtcgccgttcctgttcctgaccgccaccgtgaccctgtggagcgtgccgccattcaaagcgctgttcgctcctggcggcgcgatgtatgacttcgttatcaatatttcggtaccattcctcgacaaaatggttgcccgtatgccgccggtggttagcgccgcaacgccctacgccgcggtatataaattcgactggctgtcggcaaccggcaccgccattctgttcgccgccctgctgtccatcgtctggctgcgcatgaagccgaaagatgcgctgaccaccttcgccgggacgctgaaggatctggcgctgccgatctactctatcggcatggtgctggcgttcgcctttatctctaactattccgggctgtcgtcgaccctggccctggcgctggcccataccggccacgcgtttaccttcttctcgccgttccttggctggctgggggtattcctgaccggttcggacacctcgtctaacgccctgttcgccgcgctacaggcaacggcggcgcagcagattggcgtctccgatattctgctggtcgcggccaataccaccggcggcgttaccggcaagatgatttccccgcagtcgatcgccatcgcctgcgccgcggtaggcctggtgggcaaagagtcggatctgttccgctttaccgtcaaacacagcctgatcttcacctgcatggtggggctgatcaccacgctgcaggcctacgttttaacctggatgatcccgtgatagtgatgcctaaacgcctggccgacgacgtggcgcgtcgcgtccgggcgctgattgaagaacaacagctggaggcgggcatgcgactgcccgccgagcgccagctcgccgcccagctcggcgtctcacgcaattccctgcgcgaagcgctggcgatgctggtcaatgaaggggtgctgttgagccgtcgcggcggcggcaccttcgtccgttttcagcatgagccgtggtcagagcaaaacatcgtccagccgctgaagacgctgctggccgatgacccggactacagcttcgatatcctcgaagcccgccacgccatcgaagccagcaccgcgtggcacgcggcgatgcgcgccaccgacgccgataaagaaaaaattcgtctgtgctttgaagcgacccagagtgaagacccggatatcgcctcgcaggcggatgtccgctttcacctggcgatcgccgaagcctcgcataacgtggtgctcctgcaaaccatgcgcggctttttcgacctgctgcactcctccgttaagcagagccgccagcgcatgtatcaggtgccgccggtgtttgcccgcctgaccgaacagcaccaggccgtcatggaggcgattgtcgccggcgacgccgaggcggcgcgccaggcgatgatgggccacttaggctttgtccacgccaccatcaaacgttttgatgaagaccaggcccgccaggcgcgaattacccgcctgcccggtgaccacaatgaaaattccagggagaactcgtgatgattatttccgccgccagcgactatcgcgccgccgcacagcgtatcctgccgccgtttctgttccactatattgacggcggcgcctacgccgaacataccctgcgccgcaacgtcgaggacctttccgatgtagccttgcgccagcgtattttgcgcaatatgtcggacctgagtctggaaacgacattattcaacgagaagctggcgatgccgacggcgttggcgccggtcgggctgtgcgggatgtacgcccgccgcggcgaagtgcaggccgccggcgcggcggacgacaaaggcattccgttcaccctctctaccgtttccgtctgcccgatcgaagaggtcgccccgaccatcaagcgcccgatgtggttccagctgtatgtcctgcgcgaccgcggctttatgcgcaatgcgctggagcgcgccaaagccgccggctgctcgacgctggtctttaccgtcgatatgccgactcccggcgcccgctaccgcgacgcccattccggcatgagcggcccgaacgccgccctgcgccgctactggcaggccgtcacccatccgcagtgggcgtgggacgtcggccttaacggtcgcccgcacgatctgggcaatatctccgcctatctcggcaaaccgaccgggcttgaggattacatcggctggctggcgaataacttcgatccgtcgatttcatggaaagacctggagtggatccgcgatttctgggacggtccgatggtgatcaaagggatcctcgatccggaggacgcccgcgacgcggtgcgcttcggcgctgacggcattgtcgtctccaaccacggcggccgccagctcgatggcgtgctctcctcggcccgcgccctgccggcaattgccgacgcggtgaaaggcgacatcactattctcgccgacagcggcatccgtaacgggctcgacgtggtgcggatgatcgccctgggcgccgacagcgtgctactgggccgcgcttacctgtacgccctggcgacccacggtaagcagggcgtggcgaatctgctgaacctcatcgagaaagagatgaaagtggcgatgaccctcaccggggcgaaaagcatccgtgaaatcagccgtgattcgctggtgcagaacgccgaagcgctgcagaccttcgatgcgctgaagcagaataacgccgcgtaattctccacgttttcccttacgccgcccctctccctcagggtgagggttcaacaaatatctgctattctgccccccgcaattaagggggcagtatgctgaacatcgtgttattcgaaccagagatcccgccgaacaccgggaatattatccgcctgtgcgccaacacgggcttcagtctgcatatcattgagccgatgggcttcacctgggacgataaacgcctgagacgcgccggactggactatcacgagttcactgccgtgcagcgctatgcggattacgcggcgtttgtcgccagcgcgcagccgcaacggttgttcgccctcacgactaaaggcacgcccgcccacagcgcggtaagctatcaggacggtgatttcttgatgtttggtccggaaacgcgcggcctgccggccagcatcctcgatgccctgccgccggagcaaaaaatccgtattccgatgatgccggacagccgcagcatgaacctgtcaaacgcggtgtcggtggtggtgtatgaagcctggcgccagctggggtatcctggcgcggtcttgcgcagctaacctgagcggttcccggattacggcgcgttgcgccttatccgggctacatttctgtgcttagcagcggcaaatggcaatacatcaaatcccgtcgccgtactcgaaggtgtggtggatgccgttgaaatgctgatccatatccatcgccggcttgtcgctctccggcttgccgacgatacgcgccggtacgcccgccgcggtggtgtgcggcggaaccggctgcaataccaccgaaccggcgccaatcttcgcgccacgcccgacttcaatattgccgaggatcttcgccccggcgccaatcatcacgccttcgcgaattttcggatgacggtcgccgctggttttaccggtcccgccgagggtgaccgactgcagaatagagacgtcatcttcaatcaccgccgtttcgccgaccacaatgccggtggcatggtcgagcatgatcccgcggccgattttcgccgccgggtggatatccacctggaaagagacggagacttgattttgcaggaaaatcgccagcgcgcgtcgcccctgagtccacagccagtggccgatacgataggcctgcagggcatggaaacccttcagatagagcaacggcgtggagtatttatccaccgccgggtcgcgcgtgcgcaccgcctgaatatcgcaggcggcggaggcgatcatttccggatcggcggcgtaggcctcttccaccacttcgcgaatggcgatcgccggcataatcggggaagccagcttgttggccagcatatagctcagcgcgctgccgagattttcatgcttgagtagcgttgcgtggtaaaaactggcgagcatcggctcacagtcagccaaagcccgggcttcggctttaatattattccagacgatatccagttcttcacacggcattgcatactccaggcgatatagtaatgacctgccagttctgcgctggcagggtcattcaggtgacaaaggaaagctaattgctactgcgctcgtccttgcgggcgcgacccaataaggtcaatgctgcctcgcgcgcaatttttccgcaatacaatacctgataaatttcctcggttattggcatttcgacacctaaacgctgtgccagaacgcgaacttccttggtattgcggtagccttcaaccacctggccaatcttgtcctgggcactctgcacgtccataccctggccgagcatcatgccgaagcgacggttacgggactggttgtcggtgcaggtgagcaccaggtcaccgaggccggccatgcccataaaggtttccggatcggcgcccagcgccgcgccgaggcgggacatttccaccagcccacgggtaatcagcgccgtacgcgcattggcgccgaagccgatgccatccgacatacctgccccgatggcaatgacgtttttcaccgcgccgccgagctgcacgccgataaagtccgggttgatgtagacgcggaagcttttgccgcagtgcagtaggcgctgaaggtcttccgcaaactgcggatccgtggccgccagcgaaatcgccgtcggcaggccggcggccagctctttggcgaaggttggccccgagatcaccgccagcggaatatcatcgcccagcgcttcacgcgccacgtcctgcagcagacggccggtttcggcctccaggcctttggtggcccacactagccgcgcgtcggaacgcatcagcggtttaatctggcgtaacacctgaccgaatacatggctcggcaccacgacaaggatgtcgcggctggcggccagcgcggtggccaggtcgctctcaagatgcagcgtatccgggaaaggcacatcgggaaggaacgcggcgttgcagcgatcgtgttgcagcgtcgcgatatgtttcgggtcatggccccacagcacaacgtggtggccatttcttgccagggtgatggcaagagcggtgccgtaagagccggcaccgatcacagtcattgcagcattaagtgcgttcatcaggcatcctgatgttgttcagcaccttcgccagcctgctgctgcagatagttcatgaacagcgcgtcgaagttcactggcgcaaggttaagttgcgggaaggtaccgcgggaaaccaggctggtgatgcactcgcgcgcgtacgggaacagaatgttcgggcagtatgcgccgaggcagtgcgccatctgggtgccttcgatgccgtcgatggagaaaataccgccctgctgtacttcacagaggaacgcggtttcttcgcccagcgcagcggtcacggtcacacgcagcaccacttcataaacgccttcagccagctgggtggaggcggtatccagatcaagtttaacttccggctgccagtctttctggaaaacttgcggcgcgttcggcgcttcaaaagagatatctttggtatagatacgctggatctggaaggtcatttcggtgctgttttgttctgacatagtaaaaccctttcgtgttgtccttaaatacgcgcttccgccagggaaagcgcgcaaaaattagcgcaagaggggatcaagtccaccacgtgaatcaagcgcatacaagtcgtcacagccgccaatgtgctgcgcatcaataaaaatctgcggaaccgtcgtccgtccgctgcgctggatcatctcctcacgcttcgcggcatcgccatcgatcggcaactcatggaacgttacgcctttgctgttcagcagcgctttcgcgcggatgcagaacgggcaggtcgctttggtgtagatctcaatattggccatgacttcactcctgttgttaccctgagggttttacgccgcagcctgtgttcccttcacgtcaggcgtgaaggagaaaacgcggcggcatcaccacgcgaggtaagttatttgccgcgtaccagagggaggttttcgccgctccagccagcaatgccctctttcagtacaaagactttttcaaacccggctttgttcagcgcgctggcgggctcttgcgcctgcatgccggaaccgtctaccacaataatgggttgcgatttgtgtttttccaactcgccgacgttattggctttgatatcgctgggcagcaggttaatagcgccggcaatatggcctttacggaaatcgtcacgctgacgcaggtcgaccaccaccgcatcttctttattgataagacgcgtcgcttcaccacgggtgatgactttaactttcgacatcagccccttgaaggtggtgaacactaccgcacccagcagcgcgatccacgcgatgctcaggaccgggtgacggccgatgaattgcataatttcttgcatggggggttacaactcccgactaagtgagaaaaaaaccaggaaaggagtatacctgtgccttgcggcaattacagccagtgagcgcgatgtaatgtattttctgcgggcggtggcgaaaaaaagccgctctcgctgacccggcgcggcccggccgctccctttctttgatctttcacggggatttaaacgattcagctgtagtaaaattacgcaaaatttctgtctttgagcatgaggttgtcgcaatgtcggtttctaaaaaacctatggtactggtgattctggatggctacggctatcgcgaagaccaacaggataacgccatttatagcgctaaaacgccggtaatggacgcgctgtgggccaaacgtccacataccctgatcgatgcatccggcctcgaagtcggcctgccggaccgtcagatggggaactccgaagtaggccacgtcaacctgggcgccggtcgtatcgtctatcaggacctgacccgtctcgatgtggaaattaaagaacgcaccttcttcgccaacccggtactgaccgccgcggtcgataaagcggttgccgccggcaaagcagtacatatcatgggcctgatgtcgccaggcggcgtccacagccacgaagatcacatcatggcgatggtggagctggcggcagagcgcggcgctgagaagatctacctgcacgccttcctcgacggccgtgatacgccgccgcgcagtgcggaaaaaacgctggcgacattcgaagccaaatttgccgcgctgggcaaaggtcgcatcgcgtcgctcatcggccgctattacgccatggaccgcgacaaccgctgggatcgcgtggaacaagcttatgatctgctgaccctggccaaaggcgaattccaggccgataccgccgtcgcgggtctgcaggccgcctacgcccgtgacgaaaacgacgaattcgtgaaagccaccgttatccgcgccgccggccaggccgatgccgcgatggaagacggcgacgcgctgatcttcatgaacttccgtgccgaccgcgcgcgtgaaatcacccgcgccttcgtcaacgccgacttcgacggctttgcgcgtaagaaagtggttaatctcgatttcgtgatgctcaccgaatacgccgccgacatcaaagtcgcctgcgcctacccgcccgcctcgctggccaataccttcggcgagtggatggcgaagcacgataaaacccagctgcgcatctccgaaactgaaaaatacgctcacgtcaccttcttcttcaacggcggcgtagaagagccgtttaaaggcgaagagcggatcctgattaactcgccgaaagtggcgacctacgatctgcagccggaaatgagctccgccgagctgactgagaaactggtcgacgccatcaaaggcggaaaatacgacaccatcatctgtaactacccgaacggcgatatggttggccataccggggtgatggaagcagccgtaaaagcggttgaagcgctggatcgctgcatcgaccaggtggctcaggcggtggaatccgttggcggccagctgctgatcaccgccgaccacggcaacgccgagcagatgcgcgacccggccaccggccaggcgcacaccgcccataccaatctgccggttccgctgatctacgtcggtaataaagcggtcaaagcggtcaacggcggcaaactttccgacatcgccccgaccatgctgtcgctgatgggaatggaaatcccgcaagagatgactggcaagccgctgttcatcgtggaataatccttccccatgaggggaaaggcgatgtattcaactacatggatcgcagcggcagttcgatccgtcctttacgccagcgcgctcagcgctggcgtattgctgtgcgcgtcatctgcgcatgccgacgatcgcgatcagctaaagtccatccaggccgacatcgccgccaggcagcgggcgattaagcaacagcagcagcagcgcgcaagcctgctcgcccagctcaaagcgcaggaagaggcgatcgccgccgcggcccgcaaactgcgcgaaacccaggatagcctgaaccagctcaataagcagattgacgagatgaacgccgctctcgcgaagctggagcgccagcgcgcgtctcaggagcggaacctcgccgcgcagctcgatgccgctttccgccaggggccgcataccggcatccagatggtgctcagcggtgaagagggccagcgcaatcagcggatgcaggtctatttcagctatttcaaccaggcccgccaggagactatcgcggagttgaagaaaacgcgcgaagagatggcggtgcaaaagtcgatgctcgaagaaaaacagagccagcagcaaacgctggtctacgagcaaaaggcccagcaggcgaagctggagcaggcgcgtaacgaacggaaaaagaccctttccggcctggagtcttccattcagcagggtcagcaacaattaagtgaattacgggctaacgaatcgcgcctacgcggtcgtatcgcccaggcggaagctgccgccaaagcccgcgccgatcgggaagcacgcgacgcgcaggcggtgcgcgaccgccagcaggaagcatcgcgcaaaggcaccacctataaaccaacggaaagtgagcgttcgctgatgtcacgcaccggcgggctgggctcgccgcgcggtcaggcgttctggccggttcgcggtccgctccttcatcgatatggcgaacagctgcaaggtgaactacgttggaaagggatggttatcgccgcgtctgaaggcaccgaagtcagagccattgccgatggtcgggtcattctggccgactggctgcagggctatggtctggtggtggtggtcgaacatggcaaaggcgacatgagcctgtatggctataaccaaagcgcgctggtcagcgttggtacccaggtgcgtgccggccagcctatcgcgctcgtaggcagcagcggcggtcagggccgtccgtcgctctatttcgaaattcgccgccagggtcaggcggtcaatccacagccgtggttgggaagataagttttgcttcaatttcgcgcaattgctcttgccgtagccggttcgctggctctggcggcgccagcgttcgctggcaaactctccatcgttattgacgattttggctaccgcccgcagaccgagaatcaggtgctggcgctgccggcaactatctccgtcgccgtgctgccgaacgcgccgcacgcccgggaaatggccactaaagcgcataatcagggccatgaagtgctcatccacctgccaatggcgccgctcagcaaacagccgctggaaaaagacaccctgcgtcccgaaatgagcagcgaggagatcgagcgcattattcgcgaggcttacggcaaagtcccttacgccgtcgggctgaataaccatatgggcagcgcgatgacctccaacctgtttggcatgcagaaggtgatgcaggccctggagcgctacaatctctattttctcgacagcgtcaccatcggcaacacccaggccatgcgcgccgcgcagggtaccggcgtgaaggtgattaagcgcaaggtgtttctcgacgatacgcagaatgaagccgatatccgcaaccagttcaatcgcgccatcgccctggcgcggcgcaacggttcggcgatagccattggccatccgcatccgacgacggtgcgggtgctgcagcagacggtctataacctgccgccggatatcacgctggtgcgcccgagcagcctgctgaacgagccgcaggtcgacaactcgacgccaaactacgcccagccgcccgcgcaacaaacgcagcagaagccgcgtaatccgttccatggcgtgaagtcttgcaaaccgaagcgcccgctggagcctgtgaacgccagccgcttcttcactatcctcagcgatagcatcagccagagcgcgctgatccagtactatcgcctcaaatggcagggctgggacaaccccggcaactagaccactcaggggtccgttcgcttttgcgcgacgggcgcctggttatcttcgtgggcgtaccacgccttaaaatatttcagaaagctgtaaaacgtcgcgtacaggccggtcaccacgccgaccttgccatagcgccacgccccgctaaacagataccacttaaagaaagcgccaatggcgctgacgatcccccgcgtcagcgaaggtttgatctgctggtacttcaccagccgggtggtatagctgttcagcttattaaacacttcatgcagcgaataaaaggtatcgtggcgaacgaagcccggcagcctgacggagctcgcgtgtccgaccacctggtcatccaccggccgatcgttaaaccgcgcctgctggcggttaaagaggcgcaccggataatccggtgaggaaatggggtagatagtccgtacctgtttgcctagcacaaaccagtagcgcggcagacgccaggcgcaggtcgggtcaggctcctcccccgcttttagcgcctgaatggccgtcaccacgtcattatcaagaatttcgtcgctgtccatgcacagcacccagtcatggctggccagcccgatggcatagttcatttgcgcgccgtgggctttataggcatggtgatggacggtgagaccaaactgctggcaaatagcgacggtttcgtcggtactgccggagtcgacgacgatacattcatcggccaccttcagcagaggcggcagcacctccatcagcaggcgcgcagagttacaggtcagtaagcatacggagagtttaagcatgatagttacaaagttaaactgcgactaaacacactgtataagcgaataaccgtaaaatcgatgtagaaattgtgcgcttaatattaagcaggctaaaaatgttatccaaatctaaattaaggcgcccgcaggcgccttttttgctgatttttacgccagcatgggggattagtcccagctcaaaaccactttaccggactggccggagcgcatcgcgtcaaaacctttctggaagtcatcaatgccgaagcggtgggtgatgatcggtgagagatccagaccagactggatcagcgccgccatcttgtaccaggtttcgaacatttcgcgaccatagatacctttgataaacagccctttgaagatgaccttggtccagtcgatggacatatccgacggcgggatacccagcatcgcgatacggccgccgtggttcatggtatccagcatgctgcgaaaagccggcggcgcgccggacatctccagacccacatcgaaaccttcggtcatccccagctcggccatcacgtcattaaggttctctttggccacgttcaccgcgcgggtaacgcccattttgcgcgccagctcaagacggtactcgttgacgtcggtgatcaccacgttacgcgcgccgacgtgtttcgctaccgccgccgccatcacgccaatcggaccggcgccggaaaccagcacgtcttccccgaccagatcgaaggagagcgcggtgtgcaccgcgttgccgaacgggtcgaagatagacgccaggtcatcagagatattgtcggggattttaaaggcgttaaaggccgggatcaccagatactcagcaaagcagcccgggcggttgacgcccacgccgatggtgttgcggcacagatgggtgcggcccgcgcggcagttacggcagtggccgcaggtgatatgcccctcgccggagacgcggtcgccaatcttaaaaccacgcacttcctgaccaatccccaccacttcgccgacatattcgtgaccgaccaccatcggcaccggaatggtcttctgcgaccactcatcccagttgtagatgtgcacgtcggtcccgcaaatggcggtcttgcggattttaatcagcagatcgttatggccgacttccggttccggtacgtcggtcatccagatgccttcttccgctttcagtttggataacgctttcatctcatacccttattaggcgatgacgcccagttgtttgccgatgcgggtaaaggcttccaccgcacgctcaatttgttcaggggtatgcgccgccgacatctgggtgcgaatacgcgcctggcctttcggtaccaccggatagaagaagccggtgacatagatcccttctttctgcagctcgcgggcaaagttctgcgccaccaccgcctcacccagcatcaccggaatgatggcgtggtcggcgccggccagcgtgaagcctgccgcggtcattttttcgcggaacagacgcgcgttagcccacaggcgatcgcgcaggtctgccccctcttcaaccatctccagcactttgatggaggcggccacgatggccggcgccagagagttggagaacagatacggacgggagcgctggcgcagccactcaaccacctctttgcgcgcggcggtgtagccgccggaggcgccgcccagcgctttacccaacgtgccggtgatgatatcgacgcgccccatcacatcgcagtattcgtgggagccgcggccgttttcgccgacgaagccgacggcgtgggagtcatcgaccatcaccagcgcatcgtatttatccgccaggtcgcaaacgccttgcaggttggcgatcacgccatccatcgagaacacgccgtcggtggcgatcagcacgtgacgcgcgccggcctcgcgagcttctttcagacgcgcctccagctcttgcatatcgttgttggcatagcggaagcgcttcgctttacacagacgcacgccgtcgatgatcgaggcatggttcagggcgtcggagataatggcgtcttccgggccgagcagcgtttcaaacaggccgccgttggcgtcgaaacaggaggagtagaggatcgcgtcttccataccgaggaaatcggccagcttcttctccagctgcttatgcgtatcctgggtgccgcagatgaagcgtaccgaggccatcccgaaaccgtggctgtccatgccggatttcgccgcggcaatcagttccgggtggttcgccagacccagatagttattggcgcagaagttaatcacgtggctgtcgccgacggtaatgtccgcctgctgcgccgaggtgatgatgcgctcttctttgaacaacccttcggcccgagcggtctccagattgctagttaactgtttgtagaaatcaccacgcattgcaactctccagattcggcaaaatttggcacatattacccaaagctatacgctgatacgagatgatgcaggcctgaatgaattatttgcagcataaatcacgtcagcccagcaccttattctgcgaatggctgtaggcttgctcatgtggtgatatgataagagcattcatgtccggattgtctccgggctctcaacttcaaaggtacagttatgatcatcgttaccggcggcgcaggctttatcggcagcaacatcgttaaagcgctgaatgacaaaggcatcaccgacattctggttgtcgacaatctgaaagacggcaccaagtttgtaaacctggttgacctgaacatcgctgactacatggataaagaagactttctgatccagattatggcgggtgaagagttcggtgaaatcgaagcaatcttccacgaaggcgcgtgctcttccactaccgagtgggatggcaagtacatgatggacaacaactatcagtactccaaagagctgctgcactactgcctggagcgcgaaatcccgttcctgtacgcctcctccgcggccacctatggcggacgcaccagcgacttcatcgagtcccgcgagtacgaacagccgctgaacgtttacggctactccaaattcctgttcgacgaatacgtccgccagatcctgccggaagccaattcgcagatcgtcggcttccgctacttcaacgtctacgggccgcgcgaaggccacaaaggcagcatggcgagcgtcgctttccacctcaatacccagctgaataatggcgaaagcccgaaactgttcgaaggcagcgacggcttcaagcgcgacttcgtctacgtgggcgacgtggctgacgtcaacctgtggttctgggaaaacggcgtttccggcatctttaacctcggcaccggccgtgcggaatccttccaggccgtcgccgatgcgaccctggcataccacaaaaaaggcagcatcgagtacatcccgttcccggacaaactgaaaggccgctaccaggcgttcactcaggcggatctgactaacctgcgcaaagcgggctatgacaaaccgttcaaaaccgttgccgaaggcgtaacggaatatatggcctggctaaaccgcgacgcgtaagaaacaagcatgaaaatattggtggtaggcccgtcttgggtgggcgacatgatgatgtcgcaaagtctttatcgtacgctcagggcgcgctatccccaggcgattatcgacgtgatggcgccagcctggtgccgtccgttgctttcgcgcatgccggaagtgaacgaagcgatcccgatgccgctgggtcacggcgcgctggctatcggcgaacgccgtaagctcggccacagcctgcgcgaacgtcgctacgatcgcgcttacgtgctgccgaactcgtttaaatcggcattagtccctttctttgccaatatcccgctgcgcaccggctggcgcggcgagatgcgctacggactgctcaacgacgcccgggtactggacaaagacgcctggccgctgatggtggaacgctacgtggcgctggcctacgacaacggcgtgatgcgctgcgccaaagatctgccgcagccgctgctgtggccgcagctgcaggtcaacgaaggggaaaagtcgcaggcctgcagcgcctttaacctgtccaacgatcggccgatcgtcggcttctgccccggcgcggagttcggcccggccaaacgctggccgcactatcattatgctgcgctggcgaaaaagcttatcgacgatggctatcagattgcgcttttcggctcggcgaaagataacgaggccggcaaagagatcatcgccgccctcagcagcgagcagcaggcctggtgctgtaatctggcgggtgaaacccagctggagcaggcggtcattctgatcgccgcctgtaaagctgtagtgactaacgattcggggctgatgcacgtcgccgcagcgctggaccgcccgctggtggcgctgtatggcccgagcagtccggactttaccccgccgctgtcgcataaagcgcgggttatccgtctgattaccggctaccacaaggtgcgcaaaggcgatgccgccgaaggctatcatcagagcctgatcgacatcaccccagaacgcgtcctgcaagagctgaacgaactgttagcggaaaaaaccgagcacgaggaagcgtaacggatgcgggtattgatcgttaaaacctcctccatgggcgacgtgctgcacacgctgcccgcgctaaccgacgccgcgcaggctatccccggcatccgcttcgactgggtggttgaagagggtttcgcgcagatcccctcctggcataaaagcgtcgagcgggtgatcccggtggcgatccgccgctggcgcaaagcctggttctccgcgccgatcaaagccgagcgtcaaacctttcgcgaggccgttcaggcggtaaagtatgacgccatcatcgacgcccaggggctggtgaaaagcgccgcgctggttactcgcctggcgcacggcgtcaagcacggtatggactggcaaacggcccgcgagccgctggcgagcctgttttacaaccgccgccaccatatcgcgaaacagcagcacgcggtggagcgtacccgtgagctgttcgccaaaagccttggctacgcgaaaccccagacccagggggattacgccattgcgcgccatttcctgcagcacgaggctagcgctgccgcgccctatctggtgtttctgcacgctaccacccgcgacgataagcactggccggaaacccgctggcaggagcttctcgatctgctggccgacagcggcgtccacattaagctgccgtggggggccccgcacgaagaggcgcgggcgaagcggctggcggaaggccgggagtatgttgaagtgctgccgcgcatgagccttgagcaggtggcgcaggttctggccggcgcccgggccgtcgtctcggtcgataccgggctgagccatctgaccgccgcgctggataaaccgaactttacgctctacggcccgaccgacccggggctgattggcggatacggtaaaaaccagcatatcgtgcggccggaaaacagcgccagcaccggcgatattgcggccagccggattcatcttctcctgcaaaatcaggggctgctctgatgggatccctgtttaagcagatctaccgctatacgcgccctcgcgcgtatcgccacaatgaaaatctgtggccttttacccgtattgcgcgtgcgccaagcggcgaaatcagcgcgttacgctataaagggaaaacggtgccgctggtcagcctgagcgcgctgaaaaacagtatgcagggcgaagtcctgctgaccgccaccggcccctcaacccgcaatatcgatttttccctgttgtcgaaaacgatcccggtgatgggcgtcaatggcgcctggcatcttgccgaccggctgcacttttcgctctataccatcgtcgacatggaatttttcgataagaagccggacattatccgcgccattgtcagccagccggatattttgctgttcaccaccatgcacgggatcgccaaaatcgtcgatcgctatggggacgcgctgcgctgccgtttggcgttgattgaggacggttgctataagatttaccagccgaaagtcgccagcgaagcgataaagcgcacttaccagcagaatgcggcgatgtgctttcatcctcagcgcccggatatctgttttagcaccgatattcgccagggcatctttgatgccggcacggtggtctactgggcgctgcaaattctcgcctggctgggcttcaatactatcctggtgagcggcctggatatgaccaactttaaccagccgcgattctacgaaacacaacaagaaaaattgccttcttacctggcaacaaaagtggataccctcgtcatgccctcctttgcgcatgccgcgcaggtactgcagcaacgccagattcgggtgattaatttttccccagaaagcgctgtgccggatactatcttcgaaaaggttgcgtttaatgagtactttaaaagtgagtaacttcgccagacagggttactcgattgtctttcctttgtttttatttttcagcgcgattttttgcatgtccacccggaccaataatctgctgcatttatcgatcctgctgctattgctgtcgctggtacgccaggaaaaccgccaggcgctggccggggtgttacgcgagcagtggcagacctggacgctgctggcggctttctttatctattacgccctcagtaatgtgtggggccatacgccgcagcatattgactcgccgatcacccacggcgtgtatctgaccgggtatctgttgctgatgacgatgctgctcagggacggacgaacccgccgactggcgatgctggcggtggtcggtgggatcaccgtgctctccctgtggacgctgattatcgaccatacgctggttctcaccgaacgagcggtctcccccgagaaccccggaccaacgaacgttatcgaccttgccggttactgcggcatcggcattttaatctgcggcatgctactgaaagaaaaagccagccactggctctatctgccggtggtcatcatgctggtgatgctgctgctcacccaaagccgcgggccgatcatcgccctggtgctggcggtcggctgtacgctgcacctgcacgtcttcacccgccgcaacctgctgatcgccgcggcgctggccgtgctggtagcgctgcttttggtcatgacgccggtgggcgacatgctgctcgcccgtttcgaggagctgggcacccaaagcgggctgcgcctgagcatctggcaccatacgctgtcggagatggccagccagccgtggctggggcgcggtttcagctatgaactggatttcatcaactacagcggcgagcacatcaccaccacccacagcgtgtatatgggcgccctgctgaaaggcggcatcgtggggttactgctgctgttggcgatcattgcctgcgggctatggcaggcgtggcgcaagcgccataccgacagccgctacagtctggcgatcctgttttacgcgctggtgtttatggcctcgcaggggatgtttatcatcagcaatccccgggaaacctgggtgctgttctggctgccgctgggcattgcgctcagcaaagggttggcggaaaaacgctaacaaaaagggccgtcagcggccctttttatattaactttttaaattaactgcgggcggcgaccagccggtcggcctgctctttaatcacgggccacaccgactcaatcgccacatcggcgacattcgcttcttcacagactatctgcttcgccttgtcatagcccggcgcccagatgtgatagccgggcagcccggtattcttgagtttgcgtttgttatagaccgccaccatcggcttatcgaaagcccgggcaatatgcacgatcgaggtgtccggcgtaatgactaaatcacagctgcggatcacttctacggcggagttgatggtgctgtcggcgatgtacagcgccatatccagccccagctggcggattttttcactgcgccccaccatcacgatacagacccggtaaggcagagcatgtagccgctcgaccagggtcgccacctggtgacgacagaagtctttatcctcggaggcggtaaaagggttaatggcgatacgcagttcgacctctccggcctgagaaagcaagcgggccactttctcccgctcatggcggcagccggggagatgatagtgatacgggcggtcgtcaacgatgccaaacagcttcaccacctgcttatagcgcagggaaatatggctgttgccgtcaaaaaaagcgattgagtgatcgtaaagtttatagggctctttattaaaaccaatcacgctggtcgcccgtaaatcggcgagtaatttaaagcgttcatagctggtcacgtcatcaaaatcgataaccgcatcaaaacccgccgcccgcaacgtatttaaggacatgcggggccgatataaatatacttgctgaatgaattctgagcctgctaatatttcgctgcatattggtccggttaacaccgaaacctgatatccccgttcggccagtattctggcgcagccggtcgtgaccaccatatcaccgactttatcatccagacgcaatagcagcacgcggcgcacagccgctgggtcgaaggctttacgcgccggcttatttctgtatcgatagttaattaaattaaatttaatgccgcggaaaaaagcattctttttccgcgttaattgtttaaggatacgcatacggtaccttgagctgtgttagcgctgtgtaattttccgctggtaatattctgccaacgtcatgcccttcacctgcggcgccagccagctaaaaaaggcttcgaggtcagcgtataaacgctcaatatcccgttcattctggaacgtggggctgccgccgggcatatactctgaagagtggagcatatattccacgtagtcattgccctgcgtcaacgtttgttcgacgacttttttcatcgtctccacattgccgcccatcggtcgcagccagtgtacggagggggaacgcactttgccgcgcaggcggtcgtagccctgcttcacgctgttcatccacgctgagtgcttgtactggatgctcatcggcacttccagcagcggcgagtggccctcgcggctgatgtcattttcatcgaggaaataggcatgctgcggaaagcggcgataatcggtcccgccatcgccctgcggcgcccccttggcggtcttccagttcacccgcggggtcaccgagcaatccacctgatacccgtactctaccagcagacgcgcatagcgctcgtcaaaagcccagcgcccggcgcgatggctaaccattttggtctggaaggtatcctccagcagacgcgtcatatagtcgaccttctcacgcatcatagcgtcgctgtattcaataagataaggcttatggcgccagtcatctgcggtcagcggctcggtcggcgggctgttccacgcatgcagatgcatgccgacttccgcggtgccgcgggcaatcacgtctctggcgaattcgatataaaaggggtcgatggccatttcatagttggtcaaatagaccggtttaaagccatacttttcgcaaagctgctgaaaacgcggaagataacgcgcattctcggtggtgatgctgtcatgtttttgccagaggttatcgccctctgtatcaatcgtgatgagaaatgcgggattgtgcacgaaaacgtcctcaggccatacgtatcgggtcatggtagagcaatacaacgcttctctcaatctgtctgatcccctagaatcggaacccttatcctggatgaagaacagagtatgacgcctgaaaccctctcccgcggcccgttgaacccggcgcggatcctggtcattaagctgcgccatcatggcgacatgctgctgatcacgccgcttattcacgcgctgaaacagcagtaccccgccgccagcgtggatgtcctgttgtatgaagagacccgggatatgctcgcagccaaccccgatatccaccatatttatggtctcgatcgccgctggaaaaagcagggaaaaaggtatcagctgaagatgcaatggcagctcattcagacgctgcgccagcagcggtacgatatggtgcttaacctggccgaccagtggccgagcgcggttatcagcaaactgaccggcgccgcgacgcggattggttttgattttccgaagcgccgccacccggtctggcgctattgccacaccgcgctggcctccacccaacagcacaaccagctgcatacggtacagcagaatctctctattctcgctccgctcggtctccagttgaacgatgcgccggcgcggatgggctacagcgaagcagactgggccgccagccgcgccctgctgccggaggacttccgggaacactacatcgtcatccagccgacgtcgcgctggttctttaaatgctggcgcgaagatcgcatgagcgccctgatcaacgcgctgtccgccgaaggatacgcggtggtgctcacctccggccccgatgctagagagaagaagatggtggataccatcatcgccggctgcccgcaggcgcgactacactctttagccggccagttaacgttgcgccagctggcggcggtgatcgatcatgcccggttgtttatcggcgtcgactcggtgccgatgcatatggctgcagcccttggcactccgctggtcgccctgttcggcccctcgaagctgaccttctggcgtccgtggcaggcgaaaggcgaggtgatctgggccggcgacttcggtccgctgcccgatccggacgctatcaacaccaacaccgacgaacgttatcttgatttaattcctaccgacgccgtgatcgcggcggcgaaaaaggtactagcatgagtaaattcaggctggctctggtgcggcagaagtaccgcccggacggcggcgcagaacggtttgtctcccgcgcgctggaagccctcgacagcagtcatttgcaactgaacgtcatcacccgcgaatggcaggggccggtgaaaccggactggcagatccatatctgtaacccacgtaaatgggggcgcatcagccgcgagcgcggctttgccaacgccgcgcgcgagctctggcagcgcgagtccttcgacctggtgcagagccatgaacgtattcccggctgcgatctctaccgcgctggcgatggcgttcatcgccgctggctgcagcagcgctcgcgcattttaccggcctggaaaagccgcctgctgttcgccgaccgttaccaccgctacgtcatgcaggcggaacgcgagatgtatgaagactcacacctgcgcggggtgatctgcaacgccgagatgatcaagcgcgagattatcgaagactttggcctgccggcggagaagatccacgttatttacaacgccattgacaaccagcgcttcctgccgccagacgaagagacctttgccgccttacgcgccaaatggcagctgccgctgcaggcgacctgcctgatctacgtcggctccggctttgaacgtaaagggctggcggcggcgattcgcgccatcgcccctaccgatcgctacctgctggtggtcggcaaagataaggatcagcctcgctatcaggcgctggcgaagagcctgaactgtgaagcgcgggtgcgcttcttcggcatgcagtcggagacattgcccttctatcaaatggccgatggtctgctgctgccgaccctctacgatccgttccccaacgtcatcctcgaggcaatggcctgcggtctgccggtgatcaccaccaccggctgcggcggggcggagtttatcgtcgacggccacaatggttacgtctgcgacgctctggatatcccggcgctacagcaggcggtaatggccctgcccgcgcgcgcgctgggctccgcggaaggcggtcacgcccgcgagcgcattatggcctgcaccagcgagcgactctcaacccagctgctttctctttatcaggatctggtgaaataacgatgcgcatcttatttgtgattgacggtttacccggcggtggcgcggaaaaagtggtcctgaccctggcggcacagttcctgcgcgacggcgatcgggtgtcgctcatttcgctgcgcgatgtctgcgagtacccattgcccgaggggctcgactaccaggtagttgccgatcgctgccgtaaaccgtggcgcaagctgaccgagctgtcccgccgcgcccgccagctggatgccgcggtcgtgcgggccgaacagcaggggcaatttgaccttgtgctctccaacctgcacaaaaccgaccgcatcgtcgcccgcagccgggcgctgcgcgagcgtaacgtctggttctgtctgcacggcgtattctctgcctcctatctcgggcaccgcaccggctttgaccgctggatgaagcagcagaaaattaagcgaatttatcagggtcgcaacgtggtgacggtttccgacgcggtggggcgagatctggtggaagagtttgccctgcgcccggcacagctgaaaaccatctacaatcccttcgatatcactgccctgcgcgccgaggcggaagccgatagcgagcgcccggacggtgactacctgattcacgtcggtcgcttccatccgggcaaacgccatgaccgcctgcttgaagcctatgcgcagagcggcatcgacgcaccgctggtgctgctaggccagggaaaaccggagcaagagcagcgcctgcgccagctggcaaaaacgctgcacattgacgatcgggtgtggttcaaaggttttcagaaaaaccccttaccgtggatcaaaggcgcacggatgctggttttgagctccgatagcgaaggattcggcaatgtggtggtggaggcgctgctgttacatacccctgtcgccagcacccgctgccccggcggcgtcaccgagatcctcaccggcgaacttgcccgcggtctggcggatctgaccagtccggcgctggctcagacgatgcaaagcatttaccataacccgccggccatcgacgatgccgcgctggaaaaattcagcgtcgtatccatttgtcagcagtaccgtcagctgcagcgcacctgacgccgttagttaaccaggatcgaagatttatgagtcaaacgcctttattgagcatcgtggctgccgtctacaacggtgagaaatttctagcgcaattctttgagtgcattgaacagcagcagctggacagctatgaactgatcctggtgaacgatggttcgacagacaacagcctggcggtgatcgccgaatggcaggagcggctgcagaacgtccaggtgctggagcaggaaaaccagggcgtctcggtcgcgcgcaataccggcctcgccgccgccagcggcaaatatctcgcgtttccggatatcgacgacaaactctatccgggcatgtatcgcacgctgctggagatggccgagaaagaacatctcgatatcgccacctgcaacggcacctatgtgtacgaaaagcgccgcgagagccacccgatcttcccactggatcgcctgccctcgacgggtgtgctgccgggccatgtctggcttaagcaggccttggactcgcggaagtttctgcacgtcacctggcttaatatttatcgtcacgactttatccgccagcatcacttccatttcgagcctggcctgcgccatcaggatatcccatggaccacagaagccctgctggccgcggagcgcgtgcagtacaccagtcagcagttctatgattactacattcactctgagtcggtgtcgcataagccggacaacgacgacacgctgatgcgttcggcgcgccactatatgaagattctggagatgctggaggcgattaaccagcgctacccggataaagtacgccatatcgccgcctgtcgctggcagatcgccaaagaaggcctggggatcatccataccttcgatagcatgaaagatgagtccaaaaagcatgttattattaacgaattcttcgaccgcggtatctggcggttaatctggaaaaacgcctgtactttccgtttacgctggcgcctgggacgccgttatctgcgtattaagcgttatcgccacgcgggatagaccaaaaacccgctgtttccgccaaagagatagctttacgcgggctaaatgcttagaatttgcccgccaaaacagagaacggataaatagtttggaattgctttataccaccctactttaccttattcagccgctggtgtggctgcggctgctgctgcgcagtcgtaaggctcctgcctatcgcaaacgctgggcggaacgctatggcttctgtcagaacaaggtagagccggatggcattctgctgcactccgtttccgtcggcgagaccttagccgccattccgctggtccgcgccctgcgccaccgctacccttctctgccgatcaccgtcaccaccatgacgccgaccggctccgagcgcgccatgtcggcgtttggcaaagatgttcatcacgtctatctgccctacgatctgcccggcgccatgaaccgcttcctgaacaccgttcagccgaagctggtgatcgttatggagaccgagctgtggccgaatatggtggccgcgctgcataagcgtaagatcccgctggtgatcgccaacgcgcgcctgtccgaacgttccgccaaaggctatgccaaactgggcggctttatgcgccgcctgttgagccgcattacgcttatcgccgcgcagaatgaagaagatggtaaccgcttcctctctctggggctgaagcgcaaccagctggcggtcaccggcagcctgaaattcgatatctccgtcacgccagagctggcggcccgggcggtgacgctgcgtcggcaatgggcaccgcaccgcaaggtctggattgccaccagcacccacgacggtgaagaacaaatcatcctccaggcgcataaaaaactgctggagactttcccgaacctgctgctgatccttgttccccgccatccggagcgcttccctgacgcccgtgagatggtacaaaaggctgggatgagctttactctgcgcagcaccggcgagatcccctcctccagtacccaggtagtcattggcgataccatgggcgagctgatgctgctctacggcattgccgacctcgctttcgtcggcggcagcctggtggagcgcggcggccataacccgctcgagccggcggcgcacgccattccggtgctgatgggaccgcataccttcaatttcaaagatatctgcgccaagctgcagcaggacgatggcctgatcaccgtcaccgacgcgaactcgctggtcagggaggtgtccacgctcctgaccgatgaagattaccgcctgtggtatggccgtcacgcggtggaagtgctgcaccagaaccagggcgcgctgtcgcgtctgctacagttactgcaaccttacctgccgcagcggagtcattaatgtctaaccggctttccgtggtgatgatcgccaaaaacgcagcggacctgctgccggattgtctggactccgttagctgggcggatgaaattatcgtcctcgactccggcagtactgacagcaccgtcgagctggcccgccgcctcggcgcccaggtctatacccataccgactggcgaggctatggcattcagcgccagcgcgcgcaggattacgccaccggcgactgggtgttgatgatcgataccgatgagcgcgtcacgccagaactcaggcaggctattcttaaggtactggacgccccccagcgcggcgccatctacagcatcgcccgccgtaactattttctcggacgctttatgcgccacagcggttggtatcccgatcgcgtcctgcgcctgtacgaacgcgcccgttaccgctataacgataatctggtccatgaatcgctggatagcctgggcgccgaggttattccgctgaccggcgatctcctgcacctgacctgccgcgacttcgctggtttccagcaaaaacagctggcgtatgccgccgcgtgggcgcttgagcgtcaccagaagggcaagaagacctcgatggcagggattttcagccatacgctgggcgcgttcctcaagacgttgctattgcgcggtggggtgctggacggtaaacagggatggttactggcgatggtcaacgcgcagtatacgtttacgaaatataccgagctgtgggcgctgagccacggctactcggagaaagagtcatcatgagcacaaaagcgatctatccgggtaccttcgaccccatcaccaacggtcatatcgatattgtcacccgcgcggcaagtatgttcgataaagtggtgctggctatcgccgccagcccgagtaaaaagccgatgttcagccttgatgagcgcattgcgctggcagagcaggcgacggcccacctggtgaacgtggaggttatcggcttcagtgatttaatggccaatttcgcgcgcgcgcagcaggccaatatcctgatccgcggcctgcgggcggtggcggatttcgagtatgagatgcagctggctcatatgaaccgccacctgatgcccacccttgagagcgtgtttctgatgccgtgcaaagagtggtcgtttatctcttcctcactggtgaaggaagtggcgcgccaccagggcgacgtttctcactttctgccagctaatgtgcatcaggcgctgttgaataagctgaagtaacgcatctgccgggacatgagccacgtcggctggcgcagcactgcgccgctgggtcattcacaccggctctgtcccggtctttgtgccagatggcgctacgctgacctggcctacaaacgcccccggcccaccagatgcgcacccgcaggcccgctgacctggccgacaaacattcctgttcctgagaactacttctggcactgacggcaataaaaggtcgcccgctgggcatgtttggtcccgacgaccggcgtgccgcagatccggcagggttcgcccttgcggccatagacctgtagctcctgggcgaaatagcccggcttgccatcgctttgcaggaaatcctttaacgtggtgccgccctgctctatcgaacgcagcaggaccagcttaatcaccttcaccagctgctcacactcttcccgcgacagcgaggacgccagccggtcaggatggatcccggcggagaacagcgattcactggcgtagatattccccacgcccaccaccagcttgttatccatcagccagggtttgatcgcggttttcttcttcgcgcatttttgctggagatagtcggcgttgaacgcgtcgctgagcggctccgggccaagatgggccagtaccggatggccttccagcgttctggtccacaaccaggcgccaaagcggcgtggatcggtgtagcgcaacaccttgccgttactcatgaccaggtcaacgtgatcgtgtttttcagcaggcagctcttcgctcaggatgcgcaggctccccgacatcccaagatggacgatgatccagccgtccggcagctccagaagcaggtatttggcgcggcgacgcacgctgagaaccggaacgtcgctcaggcgatagatctcttcggaaaccggccagcgcagccgtccgttgcgcacgacggcgtgcagaatggttgcgccaaccaggtgcggctcgatgccgcgacggctggtttcaacctctggtaattcaggcatgattttcctccgtttacccgacgtattgtgcttcacggacagatgactgaaaagggagtatgtgaaagcaatatgggggagttttaaaaacaaaaaaccccgccgaagcggggtttttatacaaggaggctaaaattatttaattttagcttctttgtagataacgtgctgacgtacaaccggatcgtactttttcagttccattttttccggtttggtacgtttgttcttcgtggtggtgtagaagtgaccagtaccagcggaagaaaccagcttgattttctcacgaatacctttagccatgatttatttcctctaagtacttagtacttttcgccacgggcacgcagttcagccagaactgtatcgatgcctttcttatcgattacacgcatacctttagcagatacgcgcagggtgacaaaacgcttctcgctctcaacccagaaacggtgagagtgcaggttcggcaggaaacggcgtttagtcgcgttcagtgcgtgggaacggttgttaccggtcaccggacgcttgccagtaacttggcagactcgggacatgtctattctccaaaaatcaaattagctcgagcttcgtatggggtattggcgcctcgtcaggctttacagcctggtcatcgcagttcaatgtgaactctcgactgccaggcccaaatgccaaacccgagattctcaaaggtggcgtagtatacgctgactcggcgatgtgctcaagtcccgaacagacaaagatcccgaaggatcgccagttcggggctaaatccagccacgttcggcaaaagatacatacgcaccgcggccgataaccagatgatcaagcacgcgtatctccatgaatctacaacattttatcaccctttcggtaatcagtctgtcggcctgacttggctccgggctaccggagggatgattatgcgcaaggatcacggcggcggcgttcactttgatggcttcgcgtacaatttctcgcggatgcacctcaacgtggctaagagtaccagaaaaaagacgactatgtttcaacacccggttctgattatctaaaaagatcaccataaagatctcgcgctcctcttccgtcagctggctttgtaaaaactcgcgcgtcatcgagggggtgaccagcgcggcctcctcgaccagctgcgagctaaaatagcgtcgcgccagctcggcaatgcccttcagttgggcatatttcgccagccccagtccgtctacagcaatcagttgcgctttatcagcggaaagcagagcgtagagtgagccaaaacgctgcagtaacgcctgggcatagctgagcacatcctgacgacgcgtgccgacgcgcagaaacagcgccagcagctcaacatccgttagcgtttcgatgccgtattgcagcatcttctcccgtggcatcagattttccattccgtccatgcgccctcctgggtgaatcagcctatcctggcacagcctgacggcgctgccgacccgccgattttcaccctgcgtagccgctcgcaaagtgaatgcccggcagaggcacgacggcggcaggattgtgataagatgcgcggattctggtctacggcaacaggaagacatcatgatgactctggcgggtaaaaaaatcgtcctgggcgtcagcggcggcatcgcggcgtataaaaccccggaactggtgcgccggctgcgtgaacgcggcgcggaagtgcgtgtcgcgatgacggaggcggcaaaagcgttcatcaccccactcagcctgcaggcggtatccggctatccggtttccgacagcctgctcgatccggcggcggaagcggcaatgggccatattgagctcggtaaatgggccgacctggtgatcctcgccccagcgaccgccgatttaatcgctcgcgtggcggccggcatggccaacgatctggtgtcgacgatctgtcttgccaccccatccccggttgccgtggtgcccgccatgaaccagcagatgtatcgcgcgcaggccacccagcataatctgcagacgctcgctacccgcgggctgctgctatggggaccagacagcggtagccaggcctgcggcgacgtcggcccggggagaatgctcgatccgctaactatcgtagacatggccgcgcagcatttcgcctcccctgtcaaagatttgcaacatctcaacctcatgattaccgcgggcccgacccgtgagccattggatccggtgcgttatatcaccaaccacagctctggcaagatgggcttcgcgattgccgccgccgcagcgcagcggggcgcgaacgtgaccttgatcagcgggccggtatcgctaccgaccccgccgtttgtgcagcgcattgatgtcactaccgcgctggagatggaagcggccgtccaggctggcgcccagcagcagcacatttttattggctgcgccgcggtagcggattaccgcgccgccgtcatcgccgaagataaaataaaaaaacaaggtgatgaattaacaataaaaatggttaaaaacccggatatcgtggccggggtcgcggcgctaaaatcacatcgcccctacgtcgttgggtttgccgccgaaacgaataatgtggaagaatatgcgcggcaaaaacgtgcccgcaagaacctcgacctgatttgcgccaacgatgtttcccagcctaatcagggctttaacagcgacagcaacgcactacaccttttctggcaggatggggaaaagcgcttaccacttgagcgcaaggaactcctgggccaattattactcgacgagatcgtgacccgttatgatgaaaaaaatcgacgttaagattctggacccgcgtgtcggccagcaatttccgctgccgacctatgccacctccggctccgccggacttgacctgcgagcctgtctcgacgacgccgtagagctggcgccgggcgcaaccacgctgttgccgaccggccttgcgattcatatcgccgatccctctctggcggcggtgatcctgccgcgctccggcctgggtcataagcatggcgtagtcctgggcaacctggtgggccttatcgactccgattaccaggggcagctgatggtgtccgtctggaaccgcggtcagcagagctttattatcgagccgggcgaacgtatcgcacagatggtctttgtgccggtcgttcaggcggaatttaacctggtggaatccttcgatgccaccgaccgcggcgaaggcggcttcggtcactcagggcgtaaataagcccagcaacacggaatctgcatcccaacgcgcataacgcaataacattaccgcaagccctggtttgcggtcgcgttgtggatgtctgcctgacaagtgcttattttcaggggtattttaaaacatggcagaaaagcaaactgcgaaacggaatcgtcgcgaagaaatacttcaatctctggcgctgatgctggaatccagcgatggtagtcagcgtattaccaccgcgaaactggcggcttccgtcggcgtctctgaagccgcgctgtatcgccattttcccagcaaaacccgcatgtttgacagcctgatcgagttcattgaagacagtctgattacgcgcatcaatttgattttgaaagatgaaaaggacaccaccgcgcgcctgcgcctgatcgttctgttgattcttggctttggcgagcgtaatcctgggctgacgcgtatcctcaccgggcacgcgctgatgttcgaacaggaccggcttcagggtcgcatcaaccagctttttgagcgcatcgaagcgcagctacgccaggtgatgcgcgagaaaaaaatgcgcgaaggcgaaggctacaccctcgacgaaaccctgctggccagccagctgctggctttctgcgagggcatgctgtcgcgctttgtgcgcagcgagttcaaatatcgtccgacggatgatttcgacgcccgctggccgctggtcgccgcacagctgcagtaaatcctcacatgcagccgccaggctgcatgattctcctcgcaatctgcgtaagtttgtcgcaaatcccagggccattggttgaattgcccaatgcgcgtttccgctttcctttcctactatccagcttgctgaacatttcaccctcccccaacaccacccgacaaggagagatttgatggcgacgtcacggcgggatttactgaagataggcgggttggcaaccgcatcgctactggtcagtcaaaaaagcttcgcagcatgggccccctctgaacgctatccggacccacgcatcgtggccgtcgatgatagctttcgtcgctatatgcttgccagcgcaaaggtcgaacgcatcgccagcggcttccgctgggcggaaggcccggtctggttcggcgacatgcgaatgctgctgtggagcgacattccgaataacgccatcatgcgctgggatgaagtcagcggagaaaccagcgtctttcgctacccggccaattatagcaatggtcacgcccgcgacagacaggggcgcttaatcagttgcgagcacgacacccgccgcattacgcgtaccgaatacgatgggtctgttaccgtactggccgatagctaccagggtcatcgcctcaattctccaaacgatatcgttgtgaagtcagacggcaccatctggtttaccgatccgccatttggcatcagtggtttttacgaaggccacaaagcaacatcagaattgccgcaaaacgtctattgtctggagccggaaagccgcaaactgagcgtggtactgggcgacgtaaaagggccaaatggtttgtgtttctcgccggacgaaaagaccttatacgtggtggaaagccgggcgacaccgaaccgcttaattctggcgtgggatgtggaaggcaatacgctgaaaaataaacgggtatatctcgactgtgggaacggtaccgccgatgggatcgcctgcgacgcagacggcaatctgtggtgcggatggggaagcggaaacgaagaactcgacggcgtgcggatcttcaacccacagggtaagcatatcggcaccattaaactgccagagcgctgcgcgaacttgtgctttggcggcgaacagcgcaatcgtctgtttatggcgtccagcacgtcaatctattcgctgtacgtcaatgcgcagggcgctaagctgatatagcggaaatccggcagccgaggctgccgggcgcatcatcagacgccgtaggcttcacgataggcgcgaactgacgccaggtgttccgccatctcgggtttctcttccagataagtaatcagctctttcagagtgatgattgagataacctggcagccgtaatcccgctccacttcctgaatggcggagatctcgccgcggccgcgttcctgacgatccagggagatcagaacgcccgccagctgcgcgccctgggcctggataatctccatggattcgcgaatcgccgtaccggcggtgatcacgtcatccaccagcattacccggccctgcagcgggctaccgaccagattgccgccttcgccatgggtttttgcctctttgcggttaaagcagtaaggcagatcgcggtcatgatgctcggctaacgccaccgcggtggtggtggcgattgggattcctttgtaggccgggccaaacagcaggtcaaactcaattccggaatccaccagcgcctcggcataaaaacggcccagcagagccagatcgcgcccggtgttaaacaggccggcgttgaagaaataggggctcttgcgcccggatttcagcgtgaattcgccaaacttaagaacctgcttgctaagcgcaaactcaataaactggcgctgatacggcttcatggattcgctcctttggtacttttcatcattgtcagactgcgcgctccccttcgcaggtgtgatgaaggataaagcgcaaaaaaaaggcgacttctcagtcgccttaatcattaattttctaacgccgccttctgcgtcgtgataatggactcgatcccccctcgggctaacgccaggagagtgaggagttcttcatgggtaaacggctcaccttccgcagtgccctgcacctcaataatacggccatcttcggtcatcaccacgttcatgtcggtctccgcggcggagtcttcgatgtactccagatcgcagatggcttcgccatttacgataccgacggagaccgcggccaccatccctttcatcggattggttttcagcttgccggcggcgaccagcttattcagcgcatcggccagcgccacgcaggcaccggtaatggaggcagtgcgggtgccgccgtcggcctgcagtacatcgcagtcgagagtaatcgtgaattcgcccagcgctttcaggtcaaccgctgcgcgcagcgcgcgggcaatcaggcgctgaatttccatcgtccggccgccctgcttgccttttgccgcttcacgcgcgttacgcgtgtgcgtagaacgcggcagcatgccgtattcagcggtgatccagccctggccctggcctttcaggaaacgcggaacgccttcgtcaatagaggcagtgcacagcactttggtatcaccgaattcgaccagcacggagccttcagcgtgttttgtgtaattacgggtcagggtgacgggacgcacctgattagcgctacggcctgctggacgcatgatagaaatctccggcttgaaacgaatgtgagggcgcattatacgaatttcatggcaaaaagcctatgcccactccagccggacgcgccgataatgtcagtccagcgttttacgataagatttcaaccccacgccaatgacaatcaccgccaggcctatcagcggcaagaggtcaggcaacaatgccgttgctgaatagcctttcagcataatgcccttaaccaggcggatgaagtaggtcagcggtaaacaggagccaatggctttcgcccagtctggcatactaataaaggggctgacaaatccggacagcataagtgaagggatgaaataaaatgacgacatttgcagcgcctgcagctggttttgtgctaagccagaaataccgataccaattgacagacaaagaaagacataaattaacagcacaaaaaatagtaggaagacgctaccgtgaagggggatatcgaacaacaaaacggcggcaatcaggattaacgtcgcctgaaacagaccaatgataacaaaaggcgttattttcccaataatgacctcaagcccggacaacggagagaccagtaaattttctaacgccccgttttctcgctcgcgggtaatagacagggcggtcatcaggattaacgttgtactgagtatagaccccataataccgggaatagtattaaactgggttatcccctcagggttaaacatgcgatgaatgataagctcgaaatcatcctctttttgcaccacacgcatgtcgcccggcaaatcgtgctgaaacatcgacttcgccacctgcacaagggcgctgagcgcattccccgtggtgatcggatcgatggcatccccctgaattaatagttgtggcttttctccacgcagtaacttgcgcgtaaacccttcagggatcgtcacgataaaagtgacatccccccgcacaaaggctttctgcgccgcctcttctgaatcgacaggaatcatcgaaaaatacccggtattttgcgcttccgtcacaaagatttgactcatgcgttcggtatcataatttagtaaggcggtcggaagattatgcggatccatattgatggcatagccaagaatgatcagctgaaaaagaggtgtcaggagcaccatactgatgctgactttatcacggcgtagctcgtgaatttccttaataaccacgccaatccaccgcgtaatggagaagctaaaattaatttttttcacaattatttttcatcaagtaggtaaatgcatcttccagattggtatccaccttacagaactcataaccctgttgcgtaaaggcaaaaagcgcggattttaacttcgcttcatctctggatgtaatataaagctgattgccaaaaatgaccgtttgctcaatatccggcaagcgctgtagctggctttcaagcagcgtcagaccggcgccgctggttcgcatggtgatcaaattctgggaggcgataatcgacgcaatagtgccattcgccagcagccgaccataagatagataggcaaccttatggcagcgctcagcctcatccatataatgcgtgctcaccagtatcgagatcccccggtcagagagctggtgcagcatttgccagaactctcgccgcgccttgggatccacgccagcagtcggctcatccagaaatagcaaaacaggttcatgcaacatacaggcggcgagggccattctttgcttccagcccccagaaagctccttagccagctggtgctgtcgggcagtgaggcctaactcagaaagcgcacgttcaacccgatctctacgccgatcgaggctatataatcgcgcaataaaaagtaagttttcccgaatagttaaatttccccacattgagaaatactgggtcatgtagcctatctttttctttatcttttcccgctgcgtaaagatatccatacccagacaagtaccttcaccggaatccggcgtaatcaaaccacacatcattcgaatcgatgtcgtttttccgctaccgttcggaccgagaaaaccatagatctcgccttttgctacctgtaaagagaaatcctttacgacgtgatgctcgccaaaatgtttattgagattttttacatcaatacaaagattattcatcgccaataatctccacatcaaacggttggccgattttcatccgccctgcctgctgcagcgcagggatagcctccgccataaaaatgagcttctcacgacgtttcgtactataaataactggaggcgtaaactcggcctcagggctgatatagttaataacgccagcaatgggctcagcgcaaccatcgcatataagttttaccttagatccgattttaaatttaccgagcttcgcttcgggtataaagaagcgtacttttatattctcaggaggtaacagactgattattggtttaccagcagaagggcgctccccggcacgataaataatatcgaagactttagcattgaccggagaaacaatcgtcgtttgctggacatcccacagcgccttatcccgttcgagttttgccgcggccaccattgagcgctgcttgctaatctcatcctgccgggcagggagttgccgtgctttgagttgattaattaactcttcaacctgtgcgcctttttgagttaattcatcccggatatcctcccattccgcaagcgatatggcatgattggcgtaaagattacgatatcgcccaagctgccgctttacctgggattctgccgattgtgctttttttatctgcgaacgtataatatccaactcttcaggccgttcgccagattccagatttcgtaatagagcgctctctgctgatagcttttcctcagcgcgcaggaaaatattttgcgcatcgaaggactcaatcttcactaactcctgtcctgcggcgacgttatctcctttattgatcaagatccgttctattttttcgttaccagaatatgaaaggtatacaaattctccatgtgaataaccggataacatgttatctgatttgttatcacatccggtgagtatcagcaccgatatcaatataataaatatatttattggctttcgcattaaaacgcatccatacgcatatcatttcccttatcactacggtctggattaaggcacgctcgctccaggaccgtacagtcatcgtcagtttaatcttttaaataatgcttaacgtagctttcattcaatttatctatagagctcagatttaacccagctatcgaattaaaagaatcatcttttgtgaatgcaagaatcgacgatccgcccggggagaaccatttagcactctgtttaaaaggccagggaagttcataaccttcttctctcagcaggtgattaagcatgctccagtctgctctaaaatcttcgccacaaaatggagtatcatcctgtacattttcggcagtgaacaatgctatcggcgtacaaaaatcagttgtcgaggaaaagtatatattatagaaactgatgatgagtttctgtactttttcaggaaaagttccaggaatggtcagcacacccagcaagtatttatagtccggatatctttttataaagtcaaatatcccttgccataaataatcaagcaccttacttttttgataaggtttctgaataaagccgcggccaatttccacacacttctctaaacaggaataggcattatcatggtatttaaacaagctgttgctatagaggcctgttacaccatgttgggccagctgctcgccaacgggcataacacgatatgctcccaggatttccacatcagaaggatcccacaaaatgatatgataataactttcatcaaaaacatcgttatctcggtcgttaccagttccggcaccaatatcgcgataacagcgttcgcgtaagcgccctaactcatcaataataggtgaggttcggttagtattacagcgatatatcactagttttctaccgtcttcaaactgccttaatatttcgcactcctctattgcgctaattagctcctctttacctggttctaattcttgcggcgcaatcgtatctaacatagccgggccattcttcgctatactctggaggtgcgtcaaacatacatttgccgcggcagaaagatctttattgtattctttaaacgaggataaggctatttgctgtcctatattgattttcatggtcttgccatgatggcggagagcttcacgaataaccatcatgttcgacagttgccgccagaatgttgcagtaagataataaatcttactgtttgctcccgtaatatgaattggtaccaatgctgcattatttctcatagcaagctgtaaaaaaccggggttccacttatgctcctgtaacccggaaagagaccagttagccagcttacccgcaggacatataatcaatacgcctccttttcgcaggtgatcgttcatctcgcggaattttttatggctcatcttaccggccatattctcaattccaatggtaagttccgatacctgggggaatataattggcaaaacgtgattggctattatttttatatcactcctgactcgagagaccgtatgtattaagctaagtccatcgattaccgtcggatgatttgaaataacaaccgtagccccatgcccaggtatgttgttaagttggtggcgttcgctttcacatttcaactcaaggagttcaacaactgcattaacccactcgaccccatttttattaacgagtcgctcgttatatattaagcgagaaaataccttattgccaaatgccgtcctgaatagccattttttccaaaaaggtatggttgtatttggaaaaaattcccttacgactctgtcaaagatagcgtccatattaaaatcctttttatagaactcatcgtaaacgactatactagcgttctttcagtcggacaataccgcataaaacttaaaaaggccaaaacaaaacaattagatataattaatacaacagtattctcaccataaatacaatcaccaaagttttaataaatttatagtaatcaatgcaaaaaaaacatacataatgcttaaaggtaataccctatctcatttctggtggttatacttcctaaaactcacagaatagcttttctggcggtatatgcatttgtacaaaggcatccgaattccatgcccgtatctaatatcagaaaatattaaccatggattcccataatatataaccccacctacagcccctggtgaaaataactttgcggcgatatcccttaaaacaatcgtccttgaagtatttcatcactattcctgttaagtcaccgcccgcacggctataatccttgcattcattattacgaaaacaggaacgcctatgatccgcagtatgaccgcctatgcccgccgtgaaatcaagggtgactggggtagcgccgcatgggagctgcgctcggtaaaccagcgctatctggaaacgtacttccgcctgccggagcagttccgtagtctggagcccgtggtacgcgagcgcattcgcgcccgcctgactcgcggtaaagtcgaatgcaccttgcgttttgaacaagatcccagcgctcagggtgaactcatcctcaacgaaaagctggctaaacagctggtaaacgctgccaactgggtgaaaatgcagagcgatgaaggggaaatcaacccggttgatatcctgcgctggccgggcgtgatggccgccaaagagcaggatctcgacgccatcgccgccgacattctggccgctcttgacggcgcgctggacgacttcatcgtcgcccgcgaaacggaaggccaggccctgaaagcgcttatcgagcaacggcttgaaggcgtgagcggcgaagtggcgaaagttcgcgctcatatgccggaaattctccagtggcagcgcgagcgcctggtcgccaagctggaagatgcggaagtacagctggaaaataaccgccttgagcaagagctggtgctgatggcgcagcgtatcgacgttgccgaagaactggaccgtctcgaagcgcacgttaaagagacctataacattctgaagaagaaagaagctgtgggtcgccgtctcgactttatgatgcaggagttcaaccgtgaatcgaacaccctggcgtcaaaatcgattaacgccgaggtgaccaactccgcgattgagctgaaggtactcatcgagcaaatgcgcgagcagatccagaatatcgagtaagtatttaagcgctatcacaaagacgcacgaaaccagcaaagcccgcacatcgccgggcttttttgttatcatgggctatcataaaaacgcaacaaagagcatgattgccgtgtacacctaggtgtaccaacggcgttaggtgtactcatctaggtgtacaccccttattaaaagtttggaatagtttggatattcgcaaaatgccaaaactcacagacatgcagatccgcgcatggataaaggccggggagcgattcgagggacgctctgacggtaacgggctttatctttcataccgcgaaaactaccagacacccgtctggcgcttccgctataaattcgctgggaaaccccgcgcaatgatgatcggttcatatgccgagctatcactatcaaaggccagagagacagccaaagagctatcggctcgcgttgcgctgggctatgacgttgcgggagagaagcaggagcggaaggccgaagcgctggcgaagatggaagcagagaaaaacgccatgcgcgtttcagagcttgccgctgaatactttgagcgtcagatcctgccccgctggaagcaccccgacattctccgccgccggatagacaaggatataaatccccacatcgggcgcatgaaggtagaggacgtaaagccgcgccatattgatgacatgctcaaggcgatagtagaccgtggagcgcctaccatagcaacggacgttctacgctggacgcgccgcatattcgactacggaatcaaacggcacgcgctggagattaacccctgttcagcctttgaggtggcagacgctggagggaaggaggttagccgtgaccgctggttaacccgcgatgagttaatccagctattcaaagccatgcgcacggctaagggtttcagtcgccagaatgaaatcacgttcaaattactgttagcgttatgcgtccgcaaaatggagttatgcgccgcacgctgggaggagttcgaccttgatcaagctgtctggcgcttgccagaggaacgcagcaaaaacggcgacgctatagacatcccattagcaccgccagccgtcgaatggctgagagagcttaaaacgttctcatgcaacagcgcctgggtactgccagccagaaagatgcaaaaccgcatgatcccccatattcaggaaagcaccctgcccgttgcgctggcgaaggttcgcgctgaaatgccggacgtgccgagcttcactattcacgacttccggcgcacggcccgcacccatttagccgcgctgggcgtggatccggtagtcgcagaaagatgccttaaccacaaaattaaaggtgtggagggtatctataaccgccaccaatactttgatgaacgccgggccgcgttaacacagtgggcgggcttgctggtggcactggaacgcggcgaagaatacaacgttacaccgctgagaaaggcgaagtaaccaagatatgtaaagaataagaggacagattgagcctagcccgacggggtgaaaagcgggaagccttaccgcctggctcaatcactttaaaggcatggcgtaaaaggtaacgttatggcacatggcaaattaattaatatctgggaaaaaaataccatccctccattaccgtggtgctcactaaacagagcagcaacactattgaagtgcgaattatcagacttctcagcatggatgaatcatctaaatcctatgattgaatttaaacaaagttcagtggaaggtactctgacggttacattgaataactatgataacccatatgagtatggggatatttcaaaagaatatattgaccttatacctgtggcatcacgaggcggattgactccaacttcgccaatgatagataccgcattcaccattgataaaaataaaaaaacactggattttgtgggctactttgatggcatggcatccgttttggaagggatgtatttaattgaaaatgatgaactaattgtccttccgcaagatttgttctgtgagattcctattgcaaaactaggcgctccttatgttggtgaagactgcccggtactgtcagtagatgatattttaattagacctgtttatgcgtattgctacgatgctcagccaattgttttgagtatgaatgatgtttatctaagcagggaggatatagagctaatttacaattgcggagtccaaggtatagatttaccagaagatagattgaccgtgcctgaatcaattaaggctaagccaaaaattagggaaacggcaaagcaatctagatttattgcttatctaataaatgctttaggcgtgaagcaagacgaactaaaaacactttccatcaaaaatattatggatagattaagccatatggcaaatgagattaaatttcctgatgtaacggatgactctttacgggattggttggaaaaagccggttataggtaattatggttagttttcgccaatgaagatgtgccgttagtttcaagcaaacaatctcataactcggaggaattttctaaaactcggcgagattgtgaactgctattgatagcctttccatcaccagctatcacaggagttacgggacatatgacagcctctcaaaccgcacaatcagcacttcccactactggatacatccgccgctttcgaatgccggcgttgttaggggtgtcaatgccaaccattgatcgatgggttaaaaacggcacattgccacgcccggtgaaactcaccaataacgtgactgcctttgatgcggtagagattaacaaatggctggcagaacggcgcgggaaggtggcctgatgaaaaaagaaaaccgcccattacaggcggctaacatagatattcgcggatctgatgttacgccactagcctacaccgttcaagcctcaaagcgcattccgaagaaacaccgcgcccgcacctacatgctgcgttgtggggctggtgggtggacagaaaacgatatcctgcgcaattgccggctctcatctggccgcaactatgcgagcgaacttgagcgtgagcttgatatctgcctggaacgccttgaagagaaaaatcctgatggtatcggggcgcacatgcgctaccggtttgcgtgccgtggtgacgtgctgaaggtgattcagttcgttaaccgcatggccgcagtcaaccaacactacgggctttctaagcaggatatcgccgacattctgaacctctacccggacaacttcaccgccgcataacggagccgaaaaatgaaaatcgaaaaaagcagattcaattctgaggccgcccctcaacccaacgttaacccgggcgtaactaacggcaatgactttgccgccatcgttcccgttattcccggccaaattggcgggcgcgaaaccaatattgcgagcgccagagatttgcataaagcgctgggtgtgggccgcgactttaccaactggattaaaggccgcatcgaccagtacggatttgtggccgggactgactacatccgtgttgaaaatttgagctcaccaaaacgggcgagcgcaaaatttcgccagcaaatcgagcatgattaccttctctcgctggatatggctaaagaagtggcaatggttgagcgcaatgaacaggggcgcgccgtccgccgctatttcatccagtgcgaggaagcgctacagctgagtgcgccggaaatcgccgcgaagtatcgccggcacctcaaagcccgcattggtgctgctaacctcttcaagccgatgtgcgccgctctggatgctgcccgagcagaacaggggaaagagacgcaagcccggcactacagcaatgaaagcaacatgatcgcccgtattgtgctgggtggcatgaccgctaagcagtgggcgcaggtgaacggtatcgacggcgaaccgcgcgatagcatgagcgccgcccaactggaacacctcagctacctggagggtacaaacatcacgctgatcgatatgggcatggagtacggccagcgtaaagcggaattaacccgcctctctcagcgttggctggctaaacgtctgggggctaacgatgaataagcccaccagcacaccgctgccaaaccactcctatcgcgacgctcacggccagatggtgagcgtgaccgctgtagcgcataaccgcgtgacgttctatcgcgaggggtatcagttcccgtgcgtacagcccattgagcgcttcatgaaggagtacacggaggtgaagcaatgattacctccgcccagggtaaaagcctctctctggctggcctgatgtatgcaaaagttaacgatcttcgggcggtgtgtcaccgcaggagcctgtcaaaacctgtcattctgtgggccaatagtggctctgttgaagtttatttcgaggcaggtacgcgcgcgggtaagcgttcggaaactgactatctggaagatagcgcgtccggcgccggcggtggatgtggagcacatcacaccgccagctataaattgccgcaccgtgacaaaaaggacttgcggtctgaaggtatcccagtctatggtaatagcgcaccagcaaaatctggtgccgggattggcgtcctggtaattcgaatggcgacacatgacgcgcctagcgtctttttttgtgccgttagtctgactcaccctttttttgagcgttgggatataatccagcgcctcgcaagagcaatggtggctcaggcaggggcttcttcggaagcgccggtatccattcgagccggttacgccaaccctgcttgggctaccaccagtgaaattggcgtttccggtggtagcgttacccgctatcgaatggaggctgccgcatggctactaccctcacccaaattccgcaatttatctggattatcgccgctgttcgccgcgatatgccgacaattaccgcaaaaattcaccatatcgccgcacctactgagcgcgaagcccgccgttctctggttcgggatcacgtctgctttttcgctggccgtatccgtctggaggtggctcatgcttaaaacctacgatgtgcctgttaatccaactgaacgcacccaccacctgatttctctggcggagctgatgcgtgatgtattggacagtaaagctgattctcgcgaggactatctggaggcattgattgccatgctggagatgtctttgcgcgatctgcatggtctgctggaaggtaatgaactgccggaggtgcgccatgcgtaactatttccgcatcaccggctacgccgttaataagcgcggtttaacggtagggatcggctatcaactcacatccagcgacactaaaacagcaactgcccacgcagtgcttcaggcgcagcgtgaaggtttcagccatgtacgcattacacgcgttcaggaggtggcagcatgagcaccgcgattaccaccgtccccaacgaaatcactaccccccccgaagttatccactcaggagatgcggcggcggtagtcatttacgccagtgagcttctggaactgtggaatttgcaccttgataagccactgcgtgccgccaacccgctttttgccgcgcggcttgggacgctaatagttgaaatgcgatgcgcagccattagaaccgagcgcaaagttaatcgcctggctgatgaactaacgaagatgcgtgagtaccgggagggcggcgcatgagcaagttatccctgattgattcagcctgccgtatcaagcaagcgcagcaagttctttctctttggcttgaagcaccgattaaaaaagatagcggcacggatcatcttattggcgcagtcattacccttctggatggtatccccgagctgatggattcagtagaaggcgagttagttgatatggatctaagtttgggcggtaaagcatgagcaacgcacagaaattcagaccgggaagtgccgacttattacacgtcgaggccacgccagacggtatcaacattctgacgctgaacgatgacggcctttggcagcattcgcggatgctgggctactccgctgcgattcgccagcttgatagcggcggctatgaccgtgatttgaccgcagggatgcaggttatttccgggatctgggaagccgagaggaaaggctacctcacagaaagtagcgagcaaatggcgattgtctggcgctggctggtggcctgtctgttcattctggagcagcaggaacgcaacggcacggtagatatagccaacgacgagggcggctatgatcgtgccgtgaagtacgtcggtagacatggcggaataagcatttacccggctacggaacgcttttcactggcgaaccacgtcgaggcgctggcaattgagaaatatggcgcagatacaggattgctgatggctgttcatatgtaccagagcatgacggagacagtgccggggaaagggatgaaattgtctgctgtggggcgtgaattgctggaaggatcgcacgacagctttatccagatgctgaataccgaaggtatgccagcagcgccaacagcgcactgagggggtaacaatgcgtaatatcgaccttatccgcgaagtgaccaccaccgccgcgaacaactggcctcatgtgctggctggcctgtctatcgacgtgcctgattcatcacgccgtcatgccccctgccctgcatgtggtggaaaagaccgtttcaggttcgacgataacgggcgcggtagctttatctgcaaccagtgcggcgctggcgacggcttagacctgattaagctggtgaaccactgcgacaccaccgaagcggcacagcttgccgctgacgtgctgggtattgattaccgggctgcggaaacaaaccagaaagcagccagccagagaagggagcagatggaagctgaccgccagcagcgggagcaggagcgccagaaacaggcagcggaggacgcagagcagcgccgggctacgtttgcccgtctgtatggtgaaatgcgccagagcgccacagagggtgaatctgattacctgaaatcaaaagggctgaccgggtttaattaccccattctgcccgatggctcgctattgctggcgctggtggacggatccggcgcagtcaacgccgcgcagaccatcaccccacagggagaaaaacggcttctgaccggttcggcaaagcgcggggcatatcacgccgtaaacgcaccagaaacgccgcagagcgttttaattgccgaggggctggcaacggccctttcagttcacctgatgcgcccggacgcgctggcagtggcagcaattgacgcgggcaacctgctacccgttgccgaagtgatgcgccgtaaacacccgaaggcgcaaattattatcgccgcagacaacgaccaccaccaaaacggagaagccaatacaggctgggaggccgcagagaaagccgccttatccgtggctggctgggtatcacttccaccgactgactataaagccgactggaacgacttccaccagcaaaacgggctggaagtcgctacggctgcgtttaacgattcgatgtaccagattcagggggaagccgtgaaaccacggttgcaggccattgagggcggtaaagctgaccagccagagaaagacccgctaaagccccgcattgagagccgcaaagatggcgttttctgggtaacgcctaaagtggacaaggaaagcggggagatcatcaacaatgaaagctggctggcctcaccgatggacgttatcggaaccgggcgcgacgacaaagaccagtatttgataatcagatgggcggcttttggcgcagataccgcaacgaccgcagctatcccgctggctgatattggtgagcgcgagggctggcgcaccatgaaagcgggcgggattaacgtcacgaccaaaagcagcctacgggcgatcctggctgactggctacagcgcagcggctcgcgtgaactatggcgcgttgctcatgctacgggctggcaatgcggggcgtacatcatgccggacggggaaatcatcggcacacctgagcggcctgttttgttcagcgggcgcagttcagccgctgccgggtataccgtagcaggaacgtcggaaagctggcgtaacagtgttgcacggctggcatacggcaactacgcgatgatgacaggcatcgccgcagcactggcagcgccattaatcggggtggcagagcgtgacggattcgggattcatttttatgaacaatcgagcgccgggaaaacaaccgcgcagaacgtggcgggcagtctatacggaaaccctgatgccttgcgcctgacgtggtacgggacggcgctggggctgataaacgaggccgccgcccacaatgacggactgatgccgctggatgaagtcggacagggcgcagacccgataagcgtttctcagtctgcctatgccctgtttaacggcgtggggaaattgcagggcgcaaaggaaggaggcaaccgggatctgaaacgctggcgcaccgtggcaatcagcaccggggaaatggatttagaaacgttcatcgccaccgcaggacgcaagacaaaagcggggcaactggtgcgactgctgaatatcccgctgagtaaggcggtgcgctttcatgagtaccagacagggagagaccacgccgacgcgctgaaagacgcttaccagcaccatcatggcgctgccgggcgggagtggattagatggctttcagaccaccagcagcaggcgattgatgccgttcgtgagtgcgaggcccgctggcgcagtcttattcctgccgactatggcgaacaggttcaccgtgtaggggcaaggttcgccattctggaggccgctttactgctgggtggcgtggttactggttgggatgctcaaacgtgccgggatgcgatacagcacacctataacgcatggctgaaagagttcggcacggggaacaaagagcaccagcagatcatcgagcagacggaggcgtttttaaatgcctatgggctgagtcgattcgcgccgctgggttatgacccgcgcgatttacccatccgtgatttagccgggtacaggaagaaggggaaccacgacggcgacccgataattttctacaccttcccggcagcgtttgagcaggagattgcaaagggcttcaataccaaacagtttgccgaagttctaaagaatgcaggaatgcttacacccccaacgagcgggcgaggttatcaggggcgggtaagggaaggagggcggcaaattcgcgtttatgtgctcaacttcatggatgaggaaagcagccagccagaagaataatcttttttcacatacgtagttttagtgttgtctcagttgtctttgttgtctcattttgtaatctgcattgatttataaggattttattttaatttctgagacaacatcgagacaacatttagccattttgagacaacatggcgaacgtgtgttttttaatctggcaggcagtgagacaacatttactcagggtgagacaacactaaattgcaaatgttgtctcactaaaatccagatgtggcgcggcctgtagagccgtgagacaacaaagacaactgagacaatactatttttgtttatatgcaaaaaaatctggcgaaggtgtcccacaataagacggcgccgggtaattttcattagcaaaactaataatcagaggtattcgcaaaatgacagcacagatatcagcatacgggcggctggtggcagatccccagaccagaacgacgaacagcggaacgagcatggcaatggcgcggctggcggtggcgctgccgtgcaatgcggcagataacggagaagctactttctggctgggcgttatcgcctttggtaaacaggccgacgcgctggcagggcacgttaaaggcgatttagtcagtgttgccggagcgatgcaggtcaatcagtggacgggcaaggatggcggtacacagcagggctatcagatagtggctgacagcgtgatcagtgcaaagacggtaaggccgggcgggaagcgtagcactgcgggaatgaataccagccagccggcgagccgaccgcagcagatcgcgccgggctgggaggtgtacgacactcctgatgactttgatcaacgccagccgtttgatgatgggttttaagctggaggacaagcagcatgatacgcgacaaaaaggccgaagaactggaggctaaagggttgttccgcagggcggcggcgcggtggcttgacgttatggcggcgtgtaccgaggatgccgacagggagcaggcgaagcggaaccgtgaaagatgccttgaaggcgtaaagcgcccacgctttaagctggaggaatttgcagaccttcacagagcggcaaaagccaccactaaccgcatggggatagcgcagaacaacggggaggctttcagattgccagccagcagaaaacgagcacgtaaggcgcgcaatgatggcgcataattccggtgccctggctgcgtgggagtttgagcatcacatgtagaatcatactgccccatgaaaatgcccatatcttatttataggcagaaacggtgtgttctggctatgtatggcagaaatggtgtgttctgcctataagggcagaaagcgctcgaaagtggtcgttgagaacgcgctgtagcgggagatagttaagcgcccaccagcccgcgcagaagttcacaaggcagcgaaagagacacagcgccgcatgggaatagctcagccgaatggtgaggcgttcaggttaaaaacaagacgatgaaagtgattgtattggattaatcttcttcgatgttacgataatactttatttacttttggggataagttgatgtcagtatggaacatcattgttttgatattcgctattatcatttatgttcttcccggcgttatagccagttcaagggagcataaaaacgctacggcaatatgggtgctaaatattgtcctgggctggagcttcttgggttggatagccgcgcttgtctggtctttcacaaaccccggagtggttaagcttgaaccacaggtgtttggcgcggattctgctggtggcggtttagtagacgatactaaaaaatgtccgtattgcgccgaaacaataaaaaaagaagcaatattgtgccgattttgtggcaaagatttataaatcgacatcgtcaagcaagggtggcatcaatgaaaattattatggtattaatttcatcacttttatttctcacggcatgtaagcctacagaagagaaagccatagagttggctaaaagcgagatatcgcacgacatgaaagatccatcatctacccagtttagagatgttgtgtcaaaaaaagttggtgaaaaggacgatggctctatcgcaatgcttgtctgtggtgaggtgaactcaaagaacagctttggggcatattcagggtactcgccttttgtcatcgcgctaacgatgaaatcaaagggttttttctcctccggcgtggtgtatgcagtcgaagggaaaacagttgatgaccgtccaacacgcaagaatagtgcaaatacgatcaacccctgcaagtaacaccacaccaaacccgtgaccacgggtttttttacgccacatcatttcacaaagcgcaatgcttgccatttatgttgcataaactacaatataaattgactgtataaatatcaggggtaagcagatgaaccgatcacaaatcacggtagcactttgccgggaacatcttcagtccattcgtgaaattcaggaagaggagcgcaagcgttctccgattggtgtagcaccaacggtaaacgctattgcccgcgcattggtcgctaagggccttgaatctgttaagcggggtgggtgatggaacaactacagaggctggctgaagtaattgccgagacctatattcgcgatctgcgccgggaaactggctccaacgttcttagcattgatggtgtaagtggcaacgttgaaaaacacctgctcgccgcggggcttgtcgataacacaatatatgccgctaaagatgaatatggcgcgacatttgaacgagaagcctatcgcatgttaatgaattttatatcatttgatggtccggaatatcgccttaccgaacatggtcgattagtcataactcttctgaacaccaacgctctgaaaaaaaacaaagtaagaaccctacactgaggcgctcatgacaactgattttggcaaatacaccattgagattgaagccgatgcggccaaactgctggcgggtcaggcgagcgcagattcagctttaaagcaaattgaaaactcagtcaaaaaaacagctaactctgctgacaagctagataaaagcctggataacttgggcggaggtttttcgcgccttgctgtggccgtgaaaggatacatatcaattcaggcgttgatgaagctccaacagctgtctgaggaattcacgctacttcaggcgcgagtaacgcgtttatcttcaagttcagaggaaggtgcgcggagctttcagcagcttgtgggtattgcttcggcaaccggtgccagccttggggataccgtcaacctctggcagcaactgaccgctacactaaaaactgtaggcgccactaacagtgatgttaaccggctagtgatgaccctgcagaagatcggcgctatcggtggctcatcggctcaggaaatggctaacgctctcaggcaatttatgcagtcggttgcgtccggcagaattcaggcggaagagtttaactcagtgctggaacagatgccggaactggcgaggcagatcgccgatggtatggggattccgtttaacgagctccgtcagttgatgctggcaggcaagttagatattggtgaggtgctagcggcaatcgaaaagaggtctgacgaaatcaatcagcagtttgaaactatgccgcgtactgtatcgcaggcaacaaatgctttgatcactcagttcggggtagctatctccaaaattgatgatgctattggggcgtcgcgctatttggcaaaacttctcgaccaaactgctctttcaatctccgtagccaccggaaatgtagatcctattgttgcgatagatgcgcagttggattcgctgaataaaaaattagctgtaactgaagcggcttacaataccgtttccaaagcttctatctacactgacgcaggcactaaaacacaaatagatgctatcaaaggtcaaatagcggccctagaacgagcaaaatccctttattccgatgttggcaaggcggcatcgggttctgtagacggatctaagccagcctatatcaccaatctcgaaaagaaaactgcagagaacaacgccaattcgatcattaaatctggtcaaacagtagttgataagctcacccagcagcgtgaacagctaagcaaagacaaggccaaagggctaatcgatgataagaaatatgctgaagctgctgctgttctggataagcaaattgccgacgccagaaaaaaacaggataaaacgccgaagaatgcctttgcccgcggcgatgactcaatagacaacttgcagcggcagattgccgttttgacaatgcgctatgacgagaacaccagagaggctgcgcagtttaatgccgtggccgctctcggagctaaggccaccgacacgcaaaaagagcgggtgcgcgaactggctggacagttatttgacgcccagcagcgccagaaagaccttaacgacgcgatcagcaatgaccctgtgcgtaaggaaaataaaacctattcagacggtcgagaccagctaaagcgccagctagacggccagatgattgaccagaaaacctataaccagcaatcagagttgatggagcagcagcatcaagtcaatctggcaaaaatacgcgctcaggagcaaacagcaaacccgatagcagccgcccgcgctgaaattgacccggtacagcaactggtcaatgaaaacaaccagaagctggccctcatgcagcagtaccagcagcaggaacaggcaatactccagcagagctatcagcagggaaaaatcagttacgatcagttcatcgctgccaaatcagctacggatgctcagtatctggcgctgagaacggcgcaggagaatcagttcaacgagcagatgacggcggcgcagtggcagttgttgagccagcagggacttggctggcagactttgaccagcgccgtggatgctttctccggcagcgcgtccaacgccattaccggaatgctgactggctcaatgagcgcgtctgaggcgatgaaatcgcttggaacgaccatcctcaacagtgttgttaactcgctggtgcaggcggcaattcaggcagctattgttaagccattgctggaagcgtttggtttatctgccgaaagcacgcttggggcaagtacggcatcggcggcagagtcctacgctgcatgggcgccagcggcaatagcggcttccattgccacgctgggcagtgcggcaggcgttggctttgctgcatattctggtgctacgttggctggcaaggctcttggcggacgtaaaaatggcgggccggtatcagctggtaatatctaccctgtaggtgaaggaaacctaccggaactcatgcagaccagcaaaggactgttcatgatccccggtgatggaggaaaggtattcagtaacaaggatgtgaatagcggctctccgactatacagaaggcatcaacagggaaagaatatctcccgacatcctccgcatcatccagccaggcagaaagccgcactgaacgaccgatacaggtcaacataacccttatcgaccagaccaccggcaatcagcacaacatcactggcactgaagctttccagcaaggtgacattgtgacagttactggatggctgaatgacgtagataccgccggcccaatgtctacagcattcgcagatgctcacggactaagaaggcaggcaaggggggctttttaaagttgacccgagggggagggttaatcgcctccccttttgttacgcgggactgctttatgaatggcattttcacaggacagaaataagaactttttttcgtgtaaacgcagccagtaaacaacctaccccatgagagggtgacaaaagttgacatcgaaaggcgatcccgtgactaacgacgaaaagcgaaaactataccgcgcgtgggctgatgatatcggcggcggaacatctttcccggacgcctgcagggatatgacgtgcggagcgacgaccaggaaagggacaccctgcaaaatgacggcgctgtatgcttctggccgctgtaagttacacggaggcatgagcaccggagcaaagacaccagagggtaaggcacggcagttagagggattccggcgctggctggagaaaaggcagcagaccaccagccagagtgatagtacgcagtaaagtttgcgtcgatggtgcgcagtacgcagagaggtacgcagcaaaaagaaggttttttcagtgcgtacttgtttaagcgtgttttgcgcgtggctctgtaagtcaatgattaggcttaattatagcgaagcgcgataatcgggggagcgaatatgggtattaaaggcaggggcatgaacaacattcgccgcaacatcaatgcgctggtgagggacatcacagggcggcgcttaccgcgtgcaatgacagccgccttgcatgaaggtgggctcgtagcagcaatctatacgccagttgataccagcaccctgattaactcgcagtttaaagaggttatcaccaacggaacgcgcatcactggccgaatcggatactctgcgaattatgcaatttatgttcaggatccgaacatcccgcagaaatttaccctccccagggccagaaaagagtttttgcagcatggtgttgctgatgctaaaccgcagatggaggcagctttcctgcgagaattatcaaaacgctgattgcggagaaaacgaaactgcttaccccatgagtggttaacaattgttaaggttatagcaacgattattaggccgtactcgaagtaaccaattgtgcagaactcatataatttcgtattcattagcgggtttttttagcggagatctgaactaatgagagagcagacgcgggtttacacctctgcgctaccacgaattaacctccagtttctggcagatatgcaaagaaagctggtggactcgagcccgaaaacacagattttttgtgataccaagagcggaagggtgtgtttctctctggttcctggcggctacagtgcgacaatcaacggggtaacgcgagttattggcatcacgattacccgggcagggtttggttaccggcgatggtacatttgcccgcattgtggtggccgggttgcgaaattattcattggccggaaggacgtagggtgtcgtaaatgctggagccttcactatgccagccagagtgaagatgaggtcgctcgcttacggcggagtgtgtggaagcagaggcatgacctatggggggatgattacccgcccgcgggcagcctgctaaatagcccgctcaagtttccgaagcctgccggcatgagatgggataccttcgagcaaaagcgctctcgactgctaaagactgaatcagcttactggcggttgaaagaaccgagggatgctaaagggttcgccagcgtaatgcgcagagctgaggcgtcaatgcgctcatttgaacgggcatcgaaaaaggctaccccatgagcgccctactattaccctaatgcctaccccataagcacagcaagactacggcaaggttaattccggttctgagccggaattagctaaaaacagccggttacctgccatatcaggagcgacaacgatgttagaccgcataacactggagttagccatacaggagatagccaggcagagcggtgaaacacttgataaccacgcccgctacaccattcgaaacggcgtggcgcaggtgctacaagccaaagaaagccaccgccgcaggatggtagcgccagcctaccagtggaagaagcccaccgcgccgcgcagataacattacagcgccgccgataacttctcagcattgcgcccctgatgcttccaggcgctgtaaatgtctttatcccacgccttacccgccttagtctgataacccgcctcattgagcctctcagcgataatgcgcccgttatcgaaaccctcccggatagtgtccgcgataatcccgatcaccgccgtttcattgtacggggtaggcgggatcccctgcttacctccggctagcgccgctgccgctacttccattcgctccaccagcgccagcatacgggactgagggttactctctggctggcttagtttgctgcgcagggcatcgactagccacgctgttctatcgccgcctgatgccgctacagcctgattaaatgcgtcctgcaattcagccggaacgcggaatgctaccagattggatttgctcatgagggccgccatatcagtgttttctgtctgtacagtatatcactgtataacgctgttatacggttgggttgctggctggtttgtcatttttgatgtccacgctaacttttgacgcgccgtgctggtggtcatgaattttggaatgctttggaaatttgaaaactaccgacaaccaaaagagccgctagagtgatggtttaaggctgaatacttagcggaggcatccaaaaagatgagtgctaaatttgtactgtttgatacggatttggattgtgctgattggcaaacatgcgtcgtggttggcgctgcatactttaggggcgatcgggtgtattaaatttgccaggccgtacatgcgggggaatctcggatgtaagaggtagggacaaagtaacggtgagctactcagttgctggattaaagggcagaattctgcccttagtgctgagtggtagcgttatgggttaaccaagccgcacacactcgcctgatatcgaattatcagcgccgcatgtatcacgtattagccggcatgttcccggcaggccataacgcgtgacattacaccagacgccgggagaatccgcgctactctgcgtggtgttttgccgttgctcgtataccgtcaccctttccagcaggccaccagctaccatgttttcgagagtgcgccgggttgattcgagctggtggcgcttgtcgaacgactccatgccatgaagcagataagccacgccggacacatcgagagggggcgcaccaatctcacccgtcacccattctaggttatccggctcaaagtagctgagtatcttttttttacggctggtcattctcatggctggctgattccttattgtgggatagaggtatcatacaataagagcgacggggcaaggttgctgcaagggtgaaaaccgaccaaaagaccgagcgcctcaaaaaaccgtgtacacatgggtgtacataatgagaatcagcattacaagaaactcagtaacggcgcggcattgagccacctactcaataaacagatccaatatcgagtaacgctttctcgtttgttaatgtatttcggtatccagggccatgataaatcatggcctttttatttatctctctcacgggcgaatgataagaatctacttataaaaaatagtcgtccagttttcggttgtggcaaataagcacaacgcggcacagtcaggaaaacactaccgcgagagaaaagaatggactttaatgcgcttcaccagcaacaccaacctttgttgcttgccaatgtctgggatgccagcagcgctcaggctgctcagcaggctggttatcaggcgctgggatcctccagcgctgctatcgccgcaatgttagggtatgaagatggcgaagagatgagttttgacgagctgttttatgtcgtctcacgcatcaaaaccgttagcgaactgccgttaagcgtcgatttagagacgggctacggcgcgacaaccagccacatcattgacaatatccggcgtctggcgcatctcggcgtgagtggaataaatctcgaggatagtcatgtggtggatggtacgcgtcgtcttgacgatgcggagcgctttgccgtcaaactgcaggaaataacccgcgcctgtcccggtctgtttgttaatgtccgcaccgatacctttcttctcaacgtacaagatgcgctggttcagacgctctatcgcggtcaactctacgccaaacacggcgcatgcggtttttttgtgccttgcgtcacccgcgcggaggatattatcgccatcgttcaccacgtgcgtttacccttaaacgtaatgtgtatgcctgagctggctgacttcagcaccttatcgacactgggcgtaaaacgaatttcgatgggcaattttatttatgctgcgacgcaggccagactgaaagacttattatgtcaggtgcaaacccaacactctttctcaggtgttttttgaccatgaaaattaccgacagcatgcagtgcgatatctggtatcaggcgctgcttgaacgcgcggtggaattcaccggcgtttttttcgtcggcgtgaaaaccaccggcgtattttgtatctcggtctgtcgggcgcgaaaaccccggcgggaaaacgtcgaattttataatgactttaaatccgcgctggatgccggcttccggccatgcaaagtctgtcgcccgacggagaatgcccggacggcccccgcctttgttgaacaagcgctccgcctgctgcgagaagctccaaaggtccgcctcagcgatagcgagctacgtcagcacgatattagcccggaacgcgttcgccgctggttcctgcaaaaccacgggatcacctttcaggcttttcaacggatgcagcgtttgaatatggcgcttcaggaattaaaagcaggccgctcaactaccgatgtcgctttcgatagcggttacgagtccttaagcggcttcggctatacctgcaaaaaattgaccggtttcgcacccagcgcacaacgccaggttgttttaattcatcgttttaccaccccgttagggccaatgtttgtttgtgcaacgcaacggggaatttgtctgctggagtttgtcgacagacgagcgctggagtcagaattcagcgacctgcagcggcggttcaacgccagcatcatcacaggtgaaaatgcccacaccaggcaggcgcaacaggaaataacggagtatttcgccggacagcgtcaatcgttcgaggtggcgcttgatgccccaggcagcgagttccagcgagcggtctggcgccgtttacagcacgttagcttcggtgagacgacgcattatcaatcgattgcgatggagataggtaaaccaacggccacgcgcgcggtggctgctgcaaacggcgctaaccgcgtcgcgattatcatcccgtgccatcgaattatcggcaaagatggttcgatgaccggttacggcggcggcattgcacgaaaaatatggcttattaaccatgaggcaaccatcagggaaaaacgcggctgattttactttcaggatcaacgggcccctccctggctttcaccgcgtctcggtaagcctattttttatccagcacccggcaggttaaaaacgcccctgccgcgcacagcagcgccggagccagatagctgtgatccatgtgggtaaactccatcaccagcgccactgcggtcaacggcatctgcatggaggcggcgagaaacgcggccgcccccaccacagcgaagctgcttttatcaccgccagggaagccgagctgccagagcgcgcagagcagcaggctgaccaatccgcccaccgccagccctggggttaacaatccaccctccgcgccgccgcgcagcaccgccagaatcaccaccatcttcaatactaacaggacagcgaccatggagagaggcagcccgtcgctgagcgccagctgcattggacccttgccattgcccggaagctcggggaaataaagactcaggatggcaagaagagaaaaccccagcagacagaacaccggcatctgccagttacttcgcgcgcgtgaacgcgccgcgctggtcgctttgcgaaagagccaggcgccggtgccaagaatcgggcccgccagaatcgcccaccagagaaaggtgtgcggaagtgcgctggaaacaaaatggtattgcgattcatcccctaaccccagggtggccgtccaggcggcaatcgccgaggtcatcatcgccgccagcgttttttcccagctaaacgacagcagcatgacctcaaggctgaacaacgccccggccagcgggacgttatagaccgccgccagacctgcgcccgccccacaggcaatcagcgtgcgggtttcatcttccagcaggcgcagcttacgcgccaccatccccgcccccagcgcgcccatttcccggggcgccacctcgcggccaagcggggagcccagcgctacggtgacgatctgcagcagcgcgtggatcgtcgtggtgcccgcgggcatgggtgcgcaggggttggccaccgccgccgcaatagaaacccgcctccgcccgtagcgaccaagcagccaccagccaaatccggcgacggcgccgccggccacgattgccacgatgcggcgtggccaggacgactccgtgacgccctgtaaaaatgacaccgaaccgacgatctgcccataactgtaaccaaaagccaggtgctgaatcgcgtgtaaaatcagtgccaaaaccatgccggacagaccggccagaatcccggttaataccacggctatcaggcggatcagatgatttttattcccggcggcgacgctcattttctcaggccttgaaaaggaaaaataaaagaataaaggacgagacctaaacattgcgtaatcatagtgttttcgatagtgatacccatcgcttcacttagcattactttttctaatcaataaaaatccctaaaaaatcaataaacctttaaatcaagccatcacagatactatttccattaatttttcctggcgtaaatgattcgctttagaaaatctcaatcgtgatcctgcgcacaaatcgttaacctgcccgccattacctggggggatctatgctgcttcatgttctgtacttaatcggtatcaccgcggaagccatgaccggcgcactggctgccgggcgccggcggatggatacgtttggcgtcatcattatcgccactgcgaccgcgctgggcgggggttccgttcgcgatatcctgctggggcactatcctcttggttgggtgaagcatcccgaatatgtcatcattgtcgccgtcgccgctgtcctcacgaccattgccgctccggtgatgccgcaccttcgtcggctgtttctggtgctggacgcgctggggctgatcgtgttttccatcatcggcgcgcagatcgccctggacatgggcgaaggcccggttatcgcctctattgccgccgtgatcaccggtgtcttcggcggcgtactgcgcgatatgttctgcaaacgcattccgctggtcttccagaaagagctgtatgccgggatctcctttgccgcagccgtactctatattgctctgcaacattacgtcagcagccacgatgtggtggtgctggctacactgctgttcggctttaccgcccgcatgctggcgctacgctggaaactggggctaccggtcttccactacacccatgacgcccactaaccgccttaaaatccggggatgcgctgcccgctaagccattgcgccagcgccaccacgtccggatggtgcaggaaagccaccagctggcgggctctgatctcccccacgcccggcagcgtgcgccattgcgcttcactttttgccgccagcaaatgccagttctcgctttcgagctgcgccagcgccccctgcggcaccgggatccccatcgccagcacccagcggataaaaggtcgtttgcgaacgagatcaaactgatgccagaggtgctgcccgcgggcggcggaaatccctggcaccgcctgcagctgctcaacggtaagcgccagccaggaaaagatatgcgtcatcgggttttgctgctgaatgacgcgccataaattttcccccacgccatcgacattcagggcggactttgatgacaaccagatcagcctggaaagaaactgttcgctgcactcaggggtggcgaaatagcaggttagcgcattaaatttcgccggcggcggcgtcggtttatggcgctcggccgtccgccagacgacggcgtcgacccgaggaataccctgccctgccagactgatctgcagctgatcgccaaccccaatatgcagcatctgccagcgggacacagagccaacgttaacccgctgcacgcgtttatcatccagccgctgggcctcaagctcggccaccacgttgagtctgccgctgcggccggtactgaaacggatcgcccgtacctgcatcacccgcgatgccggaggatatttccaggctgccagccactcgccctttccgggcgaccagactcgccccggcggctcgcgtccttcgcgcacaatcacaccgtcgctgacgaagggcagcggcgagcgataccagcgctggcgccactgcgccacctgctcgatgcgcgacaccggatgggtatattgtccgctgtacttaaaccccgcctgcgccagcagctgctgacgacggcgcatatccgacgggccgtctggccaggcccagataaaaacgtccagttgactgagcgccgccgccgcgtcggctcgcatcatcaacccggcgactttcgcccgcgcgttcatccccccagcctgctgctgaacatggccgtcccggcgcagaaacagctccccctgcagtacgctgtcggccagttcaccggtcatcactttctccagcgctgggatctgccgggctcgggcggtccatgcctcaccgcgcagaccatcgccgcggctaatggcctgaaccagacgcccctggcgataaacgagagtcaccgccacgccgtccactttaggctgtatccacaggtcggatttatttttcatccagcgggcaacgctgtcctcatccgccagcttgcgcacgccggtatgggccaccggatgacgcgcatcgccggtgggcggaggcagatcgtcatcctcaggcgtcgcgcccggaaagcattgtcgccactgcgccaggcgcagggtgagctggtcgtaaacgtcatcgctcactccgctggcgccctgccgccagtaagcctctttccaggcgacaatttgctgatgaaggcgtgatgtctcctgccttcctctggccggcggccagtccggacacgtcgccagcgcgctggcagagaacatccctaacgccagccaccaccctcctttacgcattgcagtcccctcctccatcacctcgcggagagtctgctgcagaatgccgcgagccgcgacggaagctttttcgccttgcgaagcgccttccaggatttacgcctcattgcagcaacggctggcgaattcaggaaaacggcaggcaaaatgaaagaaacagcggcaaaaagtgtgacaatgactgcgtcacgccgcggcgacgtgtataataggctcgtatgtaggacctctttcgataaccacatacaaaagacactcatggctcaaggcacgctttatattgtttccgcccctagcggcgcgggtaaatccagcctgattcaggctttattaaaaacccaaccgttgtatgacacccaggtatcggtctcccataccacgcgggcgccgcgtccgggtgaagtgcacggcgaacactatttcttcgtgaatcacgacgaattccgctcgatgattggcgaaaacgcgtttctggaacatgcagaggtctttggcaactattacggcacgtcgcgtaaagcgatcgagcaggtgctggcgaccggcgtcgatgtcttcctcgatatcgactggcaaggcgcgcagcagatccgtaaaagcatgcccggcgcgcgcagtatttttattctgccgccgtcaaaagatgaactggaccgtcgcctgcgcggccgcggccaggacagcgaagaggtgatcgcgaaacggatggcccaggccgttgcggaaatgagccattacgcggaatatgattacctgattgtgaacgatgattttgacaccgccctgagcgacctgaaaaatatcatccgcgctgaacgtctgcgcatgagccgccaaaagcagcgacatggcgctttaatcaccaaactattggcagactgaacccacattcagtatcatgcccagtcatttcttcacctgtggagcattttaagtatggcacgcgtaactgttcaggacgctgtagagaaaattggtaaccgttttgacctggtactggtcgccgcgcgtcgcgctcgtcagatgcaggttggcggaaaggatccgctggtaccggaagaaaacgataaaaccaccgttatcgcactgcgcgaaatcgaagaaggtctgatcaacaaccagatcctcgacgtacgtgagcgccaggaacagcaagagcaggaagccgctgaattacaagccgttaccgcgattgctgaaggtcgtcgttaatcacacagcgggtcgcccttgtatctgtttgaaagcctgaatcagctgattcaaaactacctgccggaagaccagattaagcgtctgcggcaggcgtatctcgttgcacgtgacgctcacgagggtcagacacgttcaagcggtgaaccctatatcacgcacccggtcgcggtagcctgcattctggccgagatgaagctcgactatgaaacgctgatggccgcgctgctgcatgatgtgattgaagatacccccgccacctaccaggacatggaacagctttttggtaaaagcgtcgccgagctggtagagggggtgtcgaaacttgataagctcaagttccgcgataagaaagaggcgcaggccgaaaactttcgcaaaatgatcatggcgatggtgcaggacatccgcgtcatcctcatcaagcttgccgaccgcacccacaacatgcgtactctgggctcgctgcgcccggataaacgccgacgcatcgcccgcgaaaccctggaaatttacagcccgctggcgcaccgtttaggcatccatcacatcaaaaccgagctcgaagagctgggctttgaagcactgtaccctaatcgctaccgcgtcattaaagaggtggtcaaagcggcgcgcggcaaccgtaaggagatgattcaaaagatcctctccgaaatcgaagggcgtttgcaggaagcggggatcccctgccgcgtcagcggtcgcgagaagcatctatactccatctactgtaaaatggtgctcaaagagcaacgttttcactcgatcatggatatctacgccttccgcgttatcgtccatgatgccgatatctgctatcgcgtgctcggccagatgcacagcctctacaaaccgcgtccaggtcgtttcaaagattacatcgccattccgaaagcgaacggctatcagtctttgcatacctcgatgatcggcccccacggcgtcccggtcgaggtacaaattcgtaccgaagacatggaccagatggcggagatgggggtagcggcgcactgggcttataaagagcacggcggcgaaagcagcaccaccgcgcaaatccgcgctcagcgctggatgcaaagcctgctggagctgcagcagagcgccggtagctcgtttgaatttatcgagagcgtaaaatccgatctgttccccgatgagatttacgttttcaccccggaagggcgcattgtcgaactgcctgccggcgccacgccggtggacttcgcctacgcggtgcataccgatatcggtcatgcctgcgtcggcgcgcgcgtcgaccgtcagccctatccgctgtcgcagccgctctccagcggtcagactgtcgaaattatcaccgcgccgggcgctcgcccgaacgccgcctggctgaactttgtcgtcagttcgaaagcgcgcgccaagatccgtcagctgctgaaaaaccttaagcgcgacgattcggtcagccttggccgtcgtctgctcaatcacgcgctgggcggaagccgcaaactcgccgagatcccaccggagaatatccagcgcgaactcgatcgcatgaagctggcctcgcttgacgatctgctggcggaaatcggtctgggcaacgccatgagcgtcgtggtggcaaaaaacctgcagcagggcgaagccgctgcggcgccggtgccggccaacgcgtcgaaccacggtcatctgccaatcaaaggcgccgatggcgtgttgatcaccttcgccaagtgctgtcgtccaattccaggtgacccgattatcgcccacgtcagcccgggtaaagggctggttatccaccatgaatcctgtcgtaacattcgcggctaccagaaagagccggagaaatttatggcggttgagtgggataaagagaccgctcaggagttcatcaccgaaatcaaggtggacatgtttaaccaccagggcgcgctggctaacctgacggcggcgatcaacaccgcgtcttccaatatccagagcctgaatacggaagagaaagatggccgcgtatacagcgcctttatccgcctgaccgcgcgcgaccgcgtgcatctggcgaatatcatgcgcaaaatccgcgtcatgccggacgtgattaaagtcacccgtaaccgaaactagctttatgaactcaaagcgctacgagcgtatctgcgagatgctcgccaggcgtcagcctgacctgacggtctgcatggagcaggtccataagcctcataacgtctctgcggtcatccggaccgcagatgccgttggcgtacacgaagtgcatgccgtctggccgagcagccggatgcgtaccatggcctccgccgccgcgggcagcaacagctgggtgcaggttaaaacccaccgcactatcgcagatgccgtcggccacctgaaaggccagggcatgcaaattctcgccactcacctttccgacaaagccatcgattttcgtgaaatcgactatacgcgtccaacctgcatcctgatgggtcaggaaaaaaccggcatcacccaggaagcgctggcgctggccgatcaggacatcattatcccgatgatcggcatggtgcagtcgctgaacgtctccgtcgcctcggcgctgatcctttacgaggcgcagcgccagcggcagaatgccgggatgtaccaacgcgccaacagcatgctgccgccacaagagcagcagcgcctgctgttcgaaggcggctatccggtgctggcccgcgtcgccagacaaaaaggtctgccttacccccacgttaacgagcagggcgaagtggaagccgatgccgcgtggtgggctaccatgcaggctgcgaggtaaacccaatgtcaggccgcctgttagatgccgttccgctcagttcactcaccggtgtgggcgctgcgcagagcagcaaactggcgaagattggcctgcatacggtacaggatctgctgctgcacctgcctttacgctacgaagatcgcacccatctttacccgatagccgagctacttcccggagtttatgccaccgtggaaggtgaagtgctcaacagcaatatcaccttcggcggccggcggatgatgacctgccagatcagcgacggcaccggcatcctcaccatgcgctttttcaacttcaacgcggcgatgaaaaacagcctcgcgaccggtcgtcgggtactggcctacggtgaagccaaacgcgggaagtacggcgccgagatgatccacccggaatatcgcgtccagggcgatatgagtactccggagctgcaggaaacgttaaccccagtctatccgaccaccgaaggcatcaagcaggcgaccctgcgcaagctcaccgatcaggcgcttgagctcctggaaacctgcgcgattagcgaactcctgccgccggagctggcgcaggggatgatgagcctgccggaggcgctgcgtacgctgcaccgcccgcctccctccttgcaacttagcgagctggaaagcggcaagcacccggcgcagcagcgtctgattctggaagagctgctggcgcataacctcagcatgctggcgctgcgggcaggcgcccagcgctatcacgccctgccgctcggcgccaacgataccctgaaaaaccaactgctggcctccctgccctttaagcccaccggcgcgcaggcgcgggttaccgccgagattgaacacgatatggcgctggacgtgccgatgatgcgcctggtgcagggcgacgttggctccggtaaaacgctggtcgctgccctggccgccttgcgcgctatcgtccacggcaaacaggtggcgctgatggcgcccaccgaactgcttgccgagcagcatgccaataacttccgcaactggttcgaaccgctgggcatagaagtcggctggctggcgggcaaacagaaaggcaaagcccgtcaggcgcagcaggaggctatcgccagcggcgaggtgcagatgattgtcggcacccacgccatcttccaggagcaggtgcagtttaacggcctggcgctggtgattattgacgaacagcaccgcttcggcgtgcatcagcggctggcgctgtgggagaaaggtcagcagcaggggttccacccgcatcagctgatcatgaccgccacgccgatcccccgcaccctggcgatgaccgcctacgccgatctggacacctcgattatcgacgagctgccgccaggccgaactccggtgaccaccgtcgccatccccgacacccggcgcagcgatattatcgaccgcgtgcgcaacgcctgtacccatgaaggtcgccaggcctattgggtctgtacgctgattgaagagtccgatctgctggaagcccaggcggcggaagccacctgggaagagctcaaactggcgctgccggagctcaatatcggcctcgtccacgggcggatgaaaccggcggagaagcaggcggtgatgctggccttcaagcagggcgagatgcatctgctggtagccaccacggtgattgaagtcggcgtcgacgtgcctaactcaagcctgatgattatcgaaaacccggaacgtctgggtctggcgcagctgcaccagctcagagggcgcgtcgggcgcggcgcagtcgcttcccactgcgtgctactctataaatcgccgctctccaaaacggcgcagaaacgtctgcaggtcctgcgcgacagcaacgatggtttcgtcattgcccagaaagacctcgaaattcgcggtcccggcgagctgctcggcacccgccagaccggcaacgccgaatttaaagtggcggacttactgcgcgatcaggcgatgatccccgatgtccagcgcattgctcgccacattcatgaacgctatccgctgcaggcccaggcgcttatcgagcgctggatgccggaaaccgaacgctattccaacgcgtagcgcgcttttgccgcgctgcgggcaatttttctacacaacgagtggattatgaaacgagaactggccatcgaattttcgcgtgtcaccgaagccgccgcgctggcgggctataaatggctgggccgcggcgataagaataccgccgacggcgcagcggttaacgccatgcgcattatgcttaacctcgtcaatatcgacggcaccatcgtcatcggcgagggcgaaatcgatgaagcgccgatgctctatatcggcgaaaaagtgggtaccggcaagggcgatgcggtagatatcgccgtcgatcccatcgaaggcacccgcatgacggcgatgggccaggccaacgccctggcggtgatggcggtcggcgataagggcagcttcctcaacgcgccggatatgtatatggaaaagctgatcgtcggcccgggcgctaaaggcgctatcgaccttaatctgccgctggaagagaacctgcacaatatcgcccgcgccctgaacaagccgctgggcgagctgaccgtcaccgtgctggcgaaaccgcgccacgacgcggtcattgcccagctgcagcagctgggcgtgcgcgtgttcgctattcccgatggcgacgtcgcggcctctattctcacctgcatgccggatagcgaagtcgacgtactgtacggcatcggcggcgcgccggaaggggtggtttccgccgcggtgatccgcgccctcgacggggatatgcaggggcgcctgctggctcgccaccacgtgaagggcgataacgaagagaaccgccgcatcggtgaaaatgagctggcgcgctgcaaaaccatgggcattgaagcgggcaaagtgctgcgtctggatgaaatggcgcgcagcgataacgtcgtcttctccgccaccgggatcaccaaaggcgatctgctggacggcatcacccgcaagggcaacatggccaccaccgagacgctgctgatccgcggcaagtcgcgcactatccgtcgtatccagtcgattcattacctcgaccgtaaagatccagacattcagcagcacatcctgtaataccgctttttctctcccaggcaaccgtccgcaggcggttgccctgttcttcgtttatatttgatcaatagagctttcttgcgccttcggggtggaaatctggctcgtctggaccgaagataaggcatcgcttggcaacaggagaagacgatggcggactgggttagcggcaaagtgacaaaagtggagtactggacggacgccttgttcagtttatacgtgcgggcgcctgttcatccgtttaccgccgggcaatttaccaagctcgggctggaaatcgacggcgaacgcgtgcagcgcgcctactcctacgtcaacgcccccggcaatcccgacctcgagttctatttggtcaccgtcccggaaggcaagctgagcccgcgtctggcggcgctgaagccgggcgatgaagtcctggtggtgagtgaagcggcaggtttcttcgtcctcgaggaagtaccggattgcgataccctgtggatgctggcgaccggcactgccctcgggccgtacctgtcaattttgcaggaaggcaaggaccttgagcgctttaataacctggtgctggtccacgccgtccgctacgccgcggacctgagctatctgccgctaatgcgcgaactggagcagcgctatgccggcaaactccgtattcagacggtggtcagccgcgaaaccgtggaaggctcgctgaccggccgggtgccgtttctgattgaaaccggcgcgctggaagaggccgtcggcctgccgatgaccactgacaccagccatgtgatgctgtgcggcaacccgcaaatggtgcgcgatacccaacagctgttaaaagagacccggcagatgaccaaacatctgcgtcgccggccgggccatatgacggcggagcactactggtaatcaggcgtccgctttccagcgcacgtcctgggtctccttgccgaacttattctcgccctgggtgccgacaaacgcccccaggtcgatcagcatcatgacgataatcagcgtcggcacaaagcgcccgacgccccactgccagacctgcggcaacatcgcccagttccccgccagcagcatccacgccagaaccatcagcagcgcccacagcccggatttgccgcgatcgtgcagccgcttgaccaccaccgccgccgtcggccacagcaggcagacgataataaacgccgccgtctgcaggttgagcagattgctgcctgccagggtaaacagggcgctcatggtcaccagccagatggcaatccagatccagaaatcgcggcggccaatgcgccctttaattgagaataaccactgctgtagggtcatgcgtttttccttatcatcatcgtctgcgtagtttaccctggcgtcgtgactttttgacaagcgccgcgcttcccgatttaatcgtcagcaggcaaaaaaaggaacgacgggcatgaagaagtggacaattttgtggttaagtgggctgatgggccttgccgtcggcccgcacgcgttgtccgcagagagcgaatcgacgaccgcggcagcgccctacctgctcgccggcgcgccgagctttgaccagtcgatcagtcagttccgcgagaaattcaacgccgataacccaaagctgcctctgaacgaattccgttccatcgccaccagtcgcgatcgggctaacctgacccgcgccgccagcaaaattaacgaaaatctctatgcctccaccgcgctggagcgcggcacgctgaagatcaaatccatgcagatcacctggctgccgatccaggggccggagcaaaaggcggccaggaccaaagcgctggagtatatgagcgccatgatccgcgccttcgtgccgacttttagccaggcgcaaagccagcaaaaactgcagaaactgctggccgccggcaagggcaagcgctacttcgccgataccgaaggcgccgtgcgctatgtggtggcagatcatggggaaaagggcctgaccttcgccattgaaccgattaagctggcgctatctgaaacgctggaaggtaacaataaatgacaaaaagcaaagcctttccagtgacgagtctctatactgtttcacagaccatgctgccctctggggcggctatattccttaattcgcttaagtagcgtggagaattaaaatgcgacatcctttagtgatgggtaactggaaactgaacggcagccgccacatggtaaacgaactggttgcgaacctgcgtaccgagctggctggcgtaagcggctgtgcagttgccatcgccccgccggaaatgtatctggacctggctaagcgcgcggcagaaggcagccacattcacctgggcgcgcagaacgttgacgtgaatctgtccggcgcattcaccggtgaaacctccgccgaaatgctgaaagatatcggcgcgcagtacatcatcatcggccactccgagcgtcgtacctaccacaaagaatccgacgagctgatcgcgaagaaattcgccgtgctgaaagagcagggtctgaccccggttctgtgcatcggtgaaaccgaagccgaaaacgaagcgggcaaaacggaagaagtttgcgcgcgtcagatcgacgccgtgctgaaaacccagggcgctgccgctttcgaaggcgtggttatcgcttacgaaccagtatgggctatcggtaccggcaaatcagcgaccccggctcaggcgcaggcggtgcacaaattcatccgtgaccacattgctaaagctgacgccaaaatcgctgagcaagtgatcatccagtacggcggttccgttaacgctggcaacgccgcagagctgttcacccagccggacatcgacggcgcgctggttggcggcgcctccctgaaagctgacgctttcgcggtgatcgttaaagcagcagaagcagcgaaaaaagcgtaattcgcttttcccggtggcgacacgcgaccgggttgactgacaaaacgtgggagcccggcctagcacagcgcaagccgggctttcttttgccgttacagtttccccaacagctgataccaggcgtagtccagcggcagtaaaatcagataactcaccgccgccagcgccagacacagttgcatccccgccctcgccgggaccttgcctaaccccatcgccaccacgatcggcgacgcctgatagggcagcagcggcgtggaatagcccagcacctgaatcataatcacgcttagcagcggaaaaccggtggcgtcggcaaagctctgggcaaaggtggtatacagcgccggcacgccgttggcggtcataataaagttcagcgcgctggttatcccggtcagggcgagaaagctggtgaaaggattgtctttatccaggggcatcacctgcagcagcgcattgcccactgcgccgccaatcccggtttgggtgacggcgatcgctagccccagaatcccggcgacgtaaatgcaggtgcgcatattcaccccgctggcaaactcctcgccgttaataaagcccacccgcggcagcagcgtgatcacagccgccgccaggccggtccacgccgggccgacgccgtgccagctctcggtcacccatagcgagaggaccaccgccagcagccacgccagacgtttctcgtcgcggctcatcggcggcagcggcgccaggtcgcgcggtggatgcggcttgccgggaaacagccagcaaatcagcgccaccagcaccgcccctttcagccagccaagcaccggcgtatgcagcagtaaatagggaacataattcagatggataccgtacgagccttccgccgcgccactcatcaccagattcggcacgttggcgggcaaaatcgttgccgacagctgaaaggtgccgaaccccaccgccagcgccaggccgaaccagccgcggctgccgtcggcaatgcccgcgcggcgggccatcgccgccacgatcggcatcagcagcgcgatgcgccccatgttggagggcatcacgaacgccagggcgtagctcaggagtaccacgctggcgaccatccgcggccaggagtcggtgagcctggccgacagcgcctgcgccgcccggtccgccagtccggttttacggatggcgatgccgagcacaaagccgctgaacaccagccagaacgccgaagaggcaaagccgccgaagatcacctccggcggagcgattttcgccatcattgccgctgcgaagaacagcagcgcggtgataaattccggcagcagcgacgtcgcccagagcacgatggtgacgccgacaatcaatgaaggaaggaacagcgggtgggtaagccagagcgacatgcctgtctcctgtcgtttttttcagcaagaatacgacgacaggtaagacaggtaaacgccagaactagtggtttgcgttaaggatggcgcagcgatgatcctgaatttcttccgctgaagcccggttcagggtcagcaggttacgctccgtcgcaagcagcaccagcgagccgtcgctctgttgcgccattgccagcgcgaagcgtcccatatgttcacgcgcctccggcacctcttccgccagcatcaggaacgggctacgctgggccagctccgcctccgtcacccgtcgcgccaggtattcgtggccctgaagcccgcccggtagcggcagccagcggctgctgatcgctgcggcatccttatctaactgcgcgcgcacatcggggcgcaggcaggagatatgaatatggaaatggttttgcgtacgtccactgcgcgagttgatcgccagcgataccgcgttatcaggaaccggcgcgccgtggcgctggctcatgatttcacgcccctgccaggcctgccagaaaaagttcggcgtcaacggatccagcagcagcgggctttcggtgccgttgatgcggtaggtcggcatcagcaaatactgcagcgggccgttacggtctttaaacagcacatagccgcccttgaggttcacttccgcgcacggcgacgggttttgctgctgttgctgatggggtacgcactgctgcaggacaatcttgcgtaatgcgtccgggttgccagagtgcagccagtagtagccgcccgccagcgccgcgaggatcgccaccagcagcgccagcaaaaagtatcttactcttctcattttcattccctgttaagcctgaagcggaagagtagcgtaatttgatgactaaatgaaaacagatggtggacggggcgttatcccgggtagcggctgatgccttacccgggctacgcaccgcgcaaaactgtagccctgctaagcgtagcgcaagcagggacaagagaattaacgctggctaatctggtcgaaggtgccgccgttggagaagtgctctttctgcgctttcgtccagccgccgaactcctgatcgatggtaaacagcttcagtttcgggaattcgttagcatatttcttcgccacattcggatcgcgcgggcggtagaagttcttcgccgcaatctcctggccttccggcgagtagagatacttcaggtacgcttccgccacctgacgcgtgcctttcttatccaccactttgtcgaccaccgagacggtcggctcagccagaatcgactcacttggggtcacgatttcaaacttgtctttgcccagttcgttggtcgccagcagcgcttcgttttcccaggcgatcagtacgtcgccgatgccgcgttctacgaaggtattggtcgaaccgcgcgcgccggagtccagcacttccacgtttttatacagcgccttgacgaattcctgggctttcgcctggtcgccgtgattctgatgcagggcatagccccaggccgccaggtagttccagcgggcgccgccggagcttttcgggttcggggtaatgaccgacacgcccggtttgatcagatcgttccagtcatggatctgtttcggattgcccttgcggacgaggaacacgatggtggaggtatacggcgcagagttatccggcaggcgtttcagccagtttttatcgatgcggccgcgttcagcaatagcgtcgacatcgtaggccagcgccagcgtgaccacatccgcttcaataccgttaatcaccgaggtcgcctgtttgccagagccaccatgcgactggcggatcaccacgttgtcgccggtctcctgcttccagtgtgcgctaaacgctttgttgtactgttcgtacagctcgcgcgttggatcataagatacgtttaatagctgaatgtcttttgccagaacgctggcggatgccagcaacagagttaaccctacgccccacttattcatcgcaccgctctctttatgtgtgttgtgatgggttaagcgtgccagaaagcgattcaatgattaaagaataaaaaaagattggctataacttgcggatataaagacgcgagtaaggatgaccccctcccgggcgggagagggcgcgaagcgattagacttcttccatgcgacccagcagcgcctgcagacgttcctgccagccctgctgctgctctttcagctggctgttttcgcgctccagctcttcacgaccatgctgcgcgctctgaacttcctgcaccagggtgttgttcttttctttcagctcttcgatttccatctgcaacagagtgatggtatcaatcgcctgctgaaccttagattctaatttctcaaacacttctaatgacatcgtcatacctctcctgaacttgcaaggcgttgatagaaactcgtgtttcgtatacgcggtcccgccttaacgaaaattagcgcacatagcggtgttatcgtcgattgtatgaatccccgccgcccctgtccagcggcaagccgcgtagattgcggtttgcaacacttttcagtctttacctggtgctttcagcgcagttcgctcgtagttcatgggtcaatgttaattttatggttaacaaaatgcgtggtgaaacgctccggcagcgctctcaatgcgcgcaaatggcgcgaaaacgctcattttcttgacgaggcacacacatttgaagttcgatatttctcgtttttgctcgttaacgataaattaacactatgcctacatggcaatatggtcgtctgtgaccaccctacatacaataatcatcaccacgcttcaggattcgattatgagccaaacatcaaccttaaaaggccagtgcatcgcagagttcctcggtaccgggttgttgatctttttcggcgttgggtgcgtggctgcgctcaaggtcgcgggagccagcttcggacaatgggaaatcagcatcatctggggtctgggcgtcgccatggcgatctacctgaccgccggggtctccggtgcgcaccttaacccagcggtgactatcgcgctgtggctgttcgcctgcttcgaaggccgcaaagtggttccttttattatttcgcaattcgctggcgccttttgcgctgcggcattagtttacgggctttactacaatcttttcctcgattatgaaaccacccaccatatgattcgcggcagcgtggaaagcctcgatctggccggcattttctccacttacccgaacccgcacatcaattttgtgcaggccttcgcggtagagatggtgattaccgctatcctgatgggcgtcatcctggcgctgaccgacgatggcaacggcataccgcgcggcccgctggcccctctgctgattggcctgctgattgcggtgattggcgcctccatgggaccgctgaccggcttcgccatgaacccggcgcgtgacatcggcccgaaagccttcgcctggctggcggggtggggtgacgtcgccttcaccggcggcaaagatattccttatttcctggtgccgctgtgcgcaccggtggtcggcgcggcgctgggcgcattcagctatcgtaagctgattggccgtcacctgccttgcgacacctgcgtggaggaagagcaacagagcccctcctcttccaccgctcaacataaagcttcgctgtaatctgactacgggacaccgactatgaccgacaaaaaatatatcgttgcgcttgaccagggcactaccagctcccgggccgttgtgatggatcatgatgccaatatcgtcagcgtctcccagcgagaatttgaacagatttatcctaagccaggctgggtcgaacacgacccgatggaaatctgggcttcccaaagctcgacgctggtcgaagcgctggccaaagcggatatcaactccgatcagatcgcggccatcggcatcaccaatcagcgtgagaccgtggtggtgtgggagcgagagaccggtaaacccatctacaacgctatcgtctggcagtgccgccgtaccgcggagatctgcgagcagctcaagcgtgacgggatggaagagtatatccgcaaggccacaggcctggtggtggacccgtacttctccggcaccaaggtgaaatggatcctcgaccatgtcgaaggttcccgtgagcgtgcgaagcgcggcgagctgctgttcggcaccgttgacacctggcttatctggaagatgacccagggccgcgtgcacgtcaccgactacaccaacgcctcgcgtaccatgctgttcaacatccacgacctcgactgggacgacaagatgctagacgcgctggacattccgcgcgccatgctgccggaagtgcgcaagtcttccgaagtgtacggtcagaccaacatcggtggtaaaggcgggacccgtattcctatcgccgggatcgccggtgaccagcaggcggccctgttcggccagctgtgcgtcaaggaagggatggcgaaaaacacctacggcaccggctgctttatgctgatgaataccggcgaaaaagcggtcacctccacccacggtctgctgaccaccatcgcctgcggcccgcgcggcgaggtgaactacgctctggaaggggcggtgtttatggccggcgcgtctattcagtggctgcgcgacgagatgaagctcatcagcgatgccttcgactccgagtacttcgccaccaaagtgaaggataccaacggcgtatacgtggtacccgcgttcaccggtcttggcgcaccgtactgggacccgtatgcccgcggcgcgattttcggcctcacccgcggcgtgaactccaaccacattatccgtgcgacgctggagtccatcgcctttcagacccgcgacgtgctggaggcgatgcaggctgactccggcattcgtctgcacgccctgcgcgtagacggcggcgcggtggctaacaacttcctgatgcagttccaatccgatatcctcggcacccgtgtcgagcgtccggaagtacgcgaagtgacggcgctgggcgcggcctatctggccggtctggcggtcggtttctggcagaatctggatgaactgcaggagaaagcggtgattgagcgcgaattccgcccggggattgaaactactgagcgtaactatcgttacagcggctggaagaaagcggtgaaacgcgcgttagcgtgggaagagcacgacgaagcgtaagattgtgaagttattcccggcttgcggcgtaaacgccttagccgggctacaaaaccccaaacagcacgatcttgtagcccggacaggtgcgcagcaccgcctccgggttttttatcagccaaatatcggcagcagcaggtacagcttaatcaccagcgcgttgacgatatcgataaagaacgcccccaccatcggcactaccaggaaggccatatgcgatggcccgaaacggtcggtaatcgcctgcatattggcgatcgccgtcggcgttgcccccaggccaaacccgcaatgcccggctgccagcaccgcggcatcgtagtttttgcccatcatccgataagtgacgaacaccgcatacagcgccatcgccagcgcctgcaccgccaggataataatcatcggcagcgccagcgaggccaactcccacagcttgaggctcatcagcgccatggcgaggaacagcgacaggctgacgttgcccaataccgataccgcgcgatcgaacacccgatacaaccccgccagcgccaggctgttgctgaggatcacgccgataaacagcacgcagacgaaggtcggcagctcgaagacgctccccgccagcagttgcgcaaccaccttgcccagcgtcagacagatggcgatcagggcgatactttcgatcagcaccagcgaggtgatcacccgccccacgtccggcttttcaaaggcggttggcgccacctgatcgtccggtgtcccgtccggtgaggaagagtgcttcaccagataacgcgccaccgggccgccgatcaggccgcccagcaccaggccgaaagtcgcgcaggccatcgccacctcggtggcgttggcaaaaccgtagcgctcaacgaacagcttactccacgccgccccggtgccgtggccgccggataaggtaatcgacccggccagcagacccattagcggatccagccccagcagcgtcgccatgccgataccgagggcgttctgcagcagcagcaggccaaccaccacgatcaggaaagtgcccagcaccttgccgccggcccgcaggctggcgaggttggcgttaagaccgatggtggcgaagaacgccagcatcagcggatctttcagactcatatcgaaatcaatttcgatatccatgctttttttcagcgccagcagcgccagcgccaccagcagaccgccggcaacgggttcaggaatagtgtatttcttaaggaagggaacggtttgtacgagttttctgccgagtaacagcacgagcgttgcggcaacgagcgtcgataaggtatcgagatgaaacataaaaagctccttatgggcgcatgatccattcacacgcgacgatattcctggtgtctttagcttctcatcatgaggagtcagagggggattttacgcagaacggcggaaaaattgacagaaaaagatattttgtatccttaatgatgcgatttagcatacaaaatgttaattacctcgttgcgcatattcacggtataaatttttatgagcaaacgctggcaaacgtttgcttttggtctacagtccgataaaattcccgctttgccaccttgggattgcttgtgatgtccgttaacaccgcagagtcagaaaatgcgcaaccggttgcgcataaaccagccagcgaattaatctaccgcctcgaagatcgcccgccgctaccgcaaaccctgttcgccgccttccagcacctgctggcgatgtttgtcgcggtgatcaccccggcgctgttaatctgccaggctctcggtctcccggcgcaagatacccaacatatcatcagcatgtcgctgttcgcctccggcgtcgcctctattattcagatcaaagcctggggcccggtcggctccggactgctctccatccagggcaccagcttcaactttgtcgccccgctgatcatgggcggtaccgccttgaaaaccggcggcgccgacgtccccaccatgatggccgccctcttcggcaccctgatgctggccagctgcaccgaaatggtcctctcccggatcctgcacctggcgcgccgtatcattaccccgctggtttccggcgtggtggtgatgattatcggcctgtcgctgattcaggtcggactgacctccatcggcggcggctacgcggcgatggccgaccacacctttggtgcgccgaaaaatctgctgctggcgggtatcgtgctggcgctgattattatcctcaaccgccagcgcaacccgtacctgcgcatcgcctcgctagtgattgccatggctgccggttatctggcggcgtggttcctcgatatgctgccagccaacaccgccccgaccaacagcagcctcatcaccgtcccgacgccgctctattatggcctcggcatcgactggagtctgctgctgcccctgatgctggtgtttatgatcacctccctggaaaccatcggcgatatcaccgccacctccgacgtctccgaacagccggtctcgggtccgctgtatatgaagcgcctgaaaggcggcgtgctggctaacggcctgaactccttcgtttccgcggtcttcaacaccttcccgaactcatgcttcggccagaacaacggcgtgatccagctgaccggggtcgccagccgctacgtcggctttgtggttgccctgatgctgatcgtcctcggcctgttcccggcggtgagcggctttgtccagcatatccctgagccagtgctcggcggcgccacgctggtgatgttcggcaccatcgccgcgtccggcgtgcgcatcgtctcccgtgaaccgctgaaccgtcgggcgatcctgattatcgctctgtcgctggcggtaggcctcggcgtgtcgcagcagccgctgatcctgcagttcgccccggactggctgaaaaacctgctttcctccgggattgccgccggcggtatcacggcgattgttctgaatttaattttcccgccagaaaaggcgtgatctcatgcgttcccggtcacgcaacggccgggacgtcctccaaccaccagccccatcacggaaataaaccacgcctgccttgagaagtgcgcctaaatcgggcataacacggtgatgtgcatctcacagaatggaagaccatgaaatttcttggaaagctgattctctggctgctagtcgctctgctgctcgtcattattggcgcgtggttcctgctgcaaacccactggggcgcccgccagaccagcgcctggctcagcaatggcaccggctggcaggtctccttcgatgagatggagcacgatttctcctccccccttcatgtgcagttgcgaaacgtcacctttggtcgggaaggcaagcctgccactttggtggcaaaaacggtcgacattggcttcagcacccgccagtttagcgatccgctgcatgcggatgagatagtccttaacgacggcactctgaatctgtcaccccactctgcagacctgccgttcgctgccgaccggctgatgttgcgcaatatggctttcaacagcccggaaaccggctgggcgctcagcgcgcagcgcgtcaccggcggcgtcagcccatggacgccggaggcgggcaatgtgctggggaaaacggcgcagatccagatgagcgcgggctcgatgacgctcaatggcgtcgaagccagcaacgttctgattcagggtaagattgatcagggcgaggtcaccctctccaccctcggcgccgatgtcgcccgcggcaccttaaccggcaatgccaaacgcagcgccgatggcagctggcgggtggataacctccagctcaacgagattcgactgcagagccccgcctcgctgaccgagtttttcgcgccgttaaccacggtcccctctctgcagattggccgcctggacatcaccgacgcccgcctgcagggaccggactgggcggtaaccgacctcgacctgagcctgcgcaacctgacccttagccacggcggctggcagagtgaggacggcacgctgtcgatgaacgctagcgaatttatctacggctcgctgcatcttttcgacccgatcctcaatgccgaattctctccccagggcattgcgctgcgacagttcacttcgcgctgggagggcggcatggtgcgcacctccggcaactggctgcgcgccgggaacgccctggtgctcgacgacaccgccttcgccggactggagtacacgctgccggcgaactggaaacagctgtggatgacgccgctgccaacctggctgcaaagcctgacgctgaaaaaattcagcgccagccgcaatctgatcatcgatgtggaccctgctttcccgtggcaaattaccgccctcgatggctatggcggcgagctacagctggtgaaaaacggcagctggggagtatggaacggcagcgcgacgctgaacgccgcggcggcgactttcaaccggatcgacgtgcgccgcccatcactcaaactgaacgccacagcctcgacggtcaatatcactgagcttagcgccttcaccgagcgcggcattttgcaggccaccgccgcggtatcccagctgccgcagcgccaggtcaatctgagcttcagcggccgcggcgtgccgctgaatattctgcaggcctggggctggccgtcgctacctataagcggggatggcaatctccagctgaccgccagcggcagcgtgcaggccgatgccccgctcaaaccgacgatcaacgggcagctcagcgccgtgaatatggagaaacagcaggtggcgcaaatcatgcgcaacggcgaggtcagccccgcccccgccgcgccagcgcccgctcccgtcaccccatagcgatgcccattccctctcctctatggggagagggattgcttcccggcaaaactccactctgactactctctccctttcagggagagagttggggtgcgagtcctgaaacctgtgcgcaatacgcggctatctgtacctatttagcgcaacaggttcctttcaaatatcagagttgctataaccaaatcactggaagtcgataaaaaaccgctccctgtacctacaaaaatataaaaggatcaatcatgcctgaaatacgtcagcgtattctggagaatatgcaaaaattctcccgggccatgatcggcgccgtattgttcttgccggtcattggcttaattctggccctcagttcagtattaactaatccgacattaattgctgaaaccagtttcttacatcagcttgggcaaatgctcggcgacaccttttggcctttatttggcaacctcggcttattattttgcgtcggcatcagctatggcctggcaaaggataaaaaaaccgaagtcgcactggtttcagtgatgtgttttattatgtttcttggcgccaaccactcctggctggaacacacccatggactcgccgaaaaaattaacggtgaatattatggcaccgggcaaacccagctgctgggctttgtggtggtggatatgggcgttttcctgggcattattctcggctgcacgattgcgtgggtgcacaataaagtctctgccattgagctgcctggcgcgctgtcgatgtacggcggcgccaagctgacgctggtggcgatgacgccggtggttatcttctacgccatcgcctttacctggatttggccctttatgacccacggcatctccgccctcaccggttttatgaaaaatgccggggtcgccggggtcttcgtctatggtttctttgaaaaattccttatccccaccggcctgcaccatttcgtctggtcccccttccagctcacccagattggcggcacgctgaacgtggatggtcaggtggtctccggcacccaggccattttcctcgcctatatgcgccatcccgacctgacgccggtcatgaacgacgcattacgtttttcgcagcaagggatgaccactatctttggcctggcgggcgcctcgctggcgttctaccacaccgcgaaaccggagaagaaagcgatggcgaaggcgattctgctgccggcgattatcacctcgatgctgaccggcatcaccgagccgattgagttcaccttcttatttgtctcaccgctgctgtgggtgatccacgcgacgttaaccgccgcctcgcaggccatttgcgacatcttcaccgtacgtccctggggagcatcgggcctgatcgagtttctgatctataacctgccgctgccggtctccttaacgcgctggccgggctatgtccttatcggtatcggccagttcgccgtctactacgtgattttccgcaccctggtggtgaagctgaacctgaaaacgccgggccgggaagatgacgagaacgtgaagctctacagcaaagcagagtaccgccagaaagtcgcgcaaccgcagtcggtcaccgatgacattatccgcggcctcgggggcaaggagaatattctctccgtcgataattgttttactcgcctgcgcgtggccgtgcgcgatatggcgcgggttgatgacacgcaattaaaaaataccggcgccaacggcgtcgtacgcaatcgaaatgaagttcaggttatttatggcgtcaaagtgggacaggtacgttcccgggttgataactggttagcagaaaattaatgaggagtatttatgaaattaaccgtattaggcgggggcggcgttcgctctgcatttttagcgaaatctctggcctataacgctcaccgcattggtttaacagaagtcgtttttctcgataactctgctgataatctggcgatatttggcgaaattgcccgctatgtatttaataccattcgcccggatattcagtttagtaccaccaccgacccggtcgcagccctgcaggacgccaactatatcattaccaccctgcgggttggcggcgatgaaagccgcattcgcgacgaacgtattgcgcttgagcataacactctcggccaggagaccaccggcgccggcggtttcgcgatggccatgcgctcgatcccggcgatccttcgctattgccggctgatcgaagaacatgccgccgaagacgctattctgtttaactttaccaacccgtcaggtctggtgacggaagcgattattaagtccggctttaagcgccgggtctatgggatctgcgatgccccctccgagctgattcgtgaactgccggcgatccttggctgtgaggagcgcgacctcagcgtggaatgctatgggctgaaccatttctcctggtttacccacttcaccgtccgtggggaagaggtgaccgaacggctgatcgccagcccggaactgtaccagaagacggcgatgcagtacttctccccggagctggtacggctttgtgataatcagctcctcaatgaatatctctattattactactatcgcgacgaggcgctgaaggcgattcaaggggccggcgagacgcgcggagagcagatcgcccgcatcaatcaggagatgcgcgaggcgctgcgcaccgtggatgccagaacgcaaccggaggccgccttcaccatctggatgcagcattacctacgccgggaaaacagctatatgcagaacgaatcccggcaggagaaattccacacccgcgaaccgctgacgctgcgccagtttatcgaagagccggacaccggcggctatgccggagtggcgctggatatcctggaagcggtgaacagcaccaccaccaagcggatcgtggtgtcgatccagaatcacgacacgctcgactttttgcgcccggacgacgtgatcgagatcagctgcgacctgagccgggatggcctcaaaccggtgacgccggtgaaggtaccgacggcgcagaagaatatgattgcctgcgtgaaggagtatgagcggctggcggtggcggcgatcctgcagcaggataaatcgctggcggtgcgggcgctgatggcgcacccgctgatcggttcctattcgctggcgaaaaccctggtcgaagcctatctcgacgatgagcagttcgccgcctggcggtaatccgctgccgatgggattcccccgctcgcaccgcgcttagcgggggctaactattgctacgtagactggtaaaccacatcttcaatagtcgctcaaagcctaagatgcagtagccgaaaaacgggttgctccagtaaatatcatcatcgaacttctgcgggtcgtgaataataaacgccgtatccgcggcctgcgccagcgggctttggtagtcgccggtaaagcagaccagattaatctccttcccctccagggccttaacccagttgagcgccgagctgctgcgcccggatttagaaatgatccagatggagtcgaagcaggcggcgtttttctgttcgaggatttcgtaatcgggccacagcgccaggctggcattcacgccggtgacgagaaacttgttgtaaatatactgggcgatcagctgtgaaaagccgctgccgtggatcaggatgcgctgctgtttaaggcttgccagcagcggcgtcagcgcttcttccggctgaacgctcatgtagtcgatatcgttggtgacatcgagcttcggcatggtgatattgaacttgatgaaatagaccagctccagccagccgctgaacttcagttttttcgctagccggaccagggaagaggggttgctgtagcactgttcggccacagcgcgaactccctggcggatacactgctccgggtcgttctgaataaagcgcagcacggtcatttccgttttgcttagcttcacgtcacgaaagatattttctacgtccatggcgggctcctctcagcggcagaatacgctaacaccgttcgacaaccgcgtctgcggcctgagtcaccacaatgaaatgaacgttactttttgtacaaaaatggaataaaaaaaccctctccgcctggcgaagagggctgcagccgttaagatggtgttttacagggtaatcgtcagcgtattgccctcggcgctcaccaccacgcccagttcgctaccggtctgcgtaccgccctgcacgcccgcgacctgcgggatattgcgcagacacagcgtccagccgcgggcctcgccttcgccgctcacagcgatggcgttaccctggcgcctggccttcagggtgaagatcgtcgagccgtctgccgccggaacgtcacagcgtgcctcgcgtccatcctcaaggtggaacagctggaaggcggtgccctcatgccaggcgtaatccggcttctggtcattgttgcccagcgccagcaggctgttgtcgcgaacgtagaccggcaggctcagcgcatcgtgatgctgcttatgccagcggctacccggcaattcatcgttatgccacagatgcgtccagtgcccttccggcagataaaactgcacttcgccggcctcggagaacaccggcgccaccaggaccgaatcgcccagcatatactggcggtcgagatagtcgcaggccggatcgtccggaaactcgagcatcatcgcgcgcagcatcggcgtgccgcactcgttggccagcgccgcctgacgatagagatacggcatcatgcggcatttcagctgcgtgaagtggcgcaccacgtcgcaggactcgtcatcgtaggcccatggcacccgataggatttgctgccgtgcaggcggctgtggctggagagcaggccgaaggcgcaccagcgcttgtagacgtgggccggcgcggtgttttcgaaaccgccgatatcgtgactccagaaaccaaagccggacatgccgatcgacagcccgccgcgcaggctttccgccatcgattcgtagttggcgtagcagtcgccgccccagtgcaccgggaactgctgcgcgcccaccgaggcggagcgggcgaacagcaccgcctcctgctcgccgacggtctctttcagcaccttccacaccagctcgttatagatgaaggcgtagtggttgtgcattttctgcggatcggaaccatcaaaccactggacgtcggtcgggatacgctcgccaaagtcggtcttgaagcaatcgacccccatcgccacgaggccttttagtttgtcggcataccactggcgggcttccggattggtgaagtcataaatcgccagccccggctgccacttatcccactgccacagcgaaccgtccgggcgcttcagcagataacccttctctttcagctccttgaacaccggcgagcgctgaccgatgtacgggttgatccacacgcagaccttcagccctttcgccttcaggcgcttgatcatcccttccgggtccgggaaggtctgcggatcccattcaaaatcgcaccactggaaggccttcatccagaaacagtcgaagtggaagacgtgcagcggcagatggcgctcagccataccgtcgatgaagctattcaccgtcgcttcgtcatagttggtggtgaacgaggtcgtcagccacagaccaaacgaccatgccggcggcagcgccgggcggccggtgaactgcgtatagcggttaagcaccgctttcggcgtcgggccgtcgatcacgaagtactcaaggtattcgccttcaacgctgaactggactttagagactttctccgagcccacctcgaaggagacgcgctgcggatggttgaccagcacgccgtagccgcggttggtcagatagaacgggatatttttgtaggattgctcggtgctggtgccgccgtcctcgttccaggtttctaccgtctggccgttgcgcaccagggcggtaaagcgctcgccgaggccgtagacggtttcgccgacgccgaggtcgaggcgctcaaacatgtagttgcgctgggtcttactatcctgcacgtagccgttgttttttagctggctaccggtgatacgcacgccgtcgcgcagaaaatccagcccccagaattcgcctttagtcacccgcacgctgaggctgccgcttttcagctcggcgaacccggccgtattttctatttcgacatggacgtctttctgcacgttcagcggatagtgcgggccgttatccagcgcgccctggaagtgctccatgcgcacgccgattatcccttcctgcggcgagaaaaagcgcagggtgaacaatggcgtatccagctgccaggcgcgttcgcggacatcgcgcggcgcggcatagaccaccatttcattcccctgctgctccacctcgtaaacctgtacgggttggatcaggttgagccctggttgaatgagccagtttccatcactgattttcattaaaacgtcctcttagttttgccattctttgtcgatcggggcggcggtgaaatcttgttcgttgcgacgcgcgccctcggccagctcggccatcatttttttcaggaacggcgttttcagcgtgtagtagcgtttggcgatcaccgcgctcagcaggtagcacaccgccggaacgagggtgaacaaggcgataatgatggtgagggtggcgctgttctgggttttagcggcggcatcatagccgccgccggccagcatccagccgatcagcgcgccgcccagcgccagtcccagcttgagcacaaacagggtgccagcgaagctgatgccggtcaggcgtttgccgttacaccattcgccgtagtcgacggtgtcggacatcattacccactggattggcgtcaccagctggtgcagtacgccaatgacgaagataaagacaaacatggtgatttcggcgtccatcggtacgaagaacatcgccacgctgagcaccgccaggagggcgttggtccaccagaagacgctgactttgcatttccagtcggtcagcggtttcgccagcgccgagccaatcaggttgccgacgcagtaggtcgtgaggaaggcggtgaacagcgccgccgagcccatgatccaggtggtgtaatacatcatcgcgccgccgcgaacgcagaccgcgaggatattgaggatggtgagcacgccaaccacccgccactggtcattgcgccagatatcgcgcaggtcttcacgcatcgaggtactgctcggcggcgcttcgacacgctctttggtggtaaagaagcagaaggccagcatcaggaaggcaatcaccgacagcaccgcgatgcccccctggaagccgagcgctttgtcttcgccgccgataaagttgaccagcggcatcatcagcacggtggagagcatgccccccgccgtcgccagcacgaagcgccaggactgcagcgaaatgcgctgcgtcgggttgtcggtgatcacgccgcccagcgcgcagtaagggatattcaccacggtgtagagcagggtcagcagcgtgtaggtcacggcggcgtagatcagcttgccgttgtggcttaaatccggcgagctgtaggccagcacgcagacgaggccgaacgggatagcgccgaagaggatccatgggcggaacttaccccagcggctgcgggtacggtcggcaagcagacccatacacgggtcggaaatcgcgtccagcgcgcgcgccagcaggaacatggtgccgacaaagccggcggggataccaaaaatatcggtgtaaaaaaacatcatgtacaacatgacgttatcaaaaataatgtggctggcggcatcacccatgccataaccaattttctctttgacggacaaaatgtgatctttcatatgcgcactattcccttagcggcaccgagggttggtaccggttacggtttttgtaaacctttgccgcactaagatgaattgcgatatctcgttatcagattacgtttcttgttttctgtgatcgcggtagggaatcagggagtgaaaaagtgtaactcacggattttgtgaggatttgtccaggactgttctgtaaagtccagttttaacagtaaaaaagtgcgtttaggtatgtggtaaacggctgaaagtagctataatgcgccccgcctccatgtagcaatcgaggcgcggaagatcgtcatctccggtgaggtggctggacttcaaatccagttggggccgccagcggtcccgggcaggttcaactcctgtgatcttccgccagtttgcccctgctcccccacagccactccctaccaacctgagccccccaaactcatcatcccagccaatcatttttatccaaaccctgcgttattttgtctctcgcaaacccgttacactggcgcggtggccgcgtgccgttaccaaccgaaacaggagagccataatgacccccgaactcagacactgtttttccattaccatccaggttgataaaccgataattgtctcccgcagcccgcagaccggtaagcgccagctgatcccgattgtcggcggcagcgtctcgggtcaacttcgcggccacgtattacccggcggcgtcgacagccagataatcgaacccgacggcacctgcaggctgtccgcccgctatgccctgcaggtggcggaaggcacggtctatgtggaaaacaatggcatccgccgggtgccggcccagtatcatgaccagcttttcgccgacgatatgcgcttttttagcgatattccgccagaagccatctattttcgcaccgtgcccacctttgaggtggatgctcccgcgctcagctggctaaccacctcgctgtttatctgcgccggtggccggacccaggatggggtgatgctcgacttctatcaggtgggctgattttcactttctgcatataactgttattgccgttagcccgtttttcccctcccggcagcggtctacgatggctccatcttttcattcacccgaatcacagaccggagcagttatgaaagctatcgccattactcaagccgccgctgacggcaacaacatcccttctttaaccgagatcgacctgccgatccccaccgcccacgggcgtgatctgctggtcgctgtgaaggctatctcggtcaatccggtagacaccaaagtgcgcgccggctttcagggcgacacgccgcgggtgctgggctgggacgccgttggcgtggtgcagtccgtcggtgaggaagtgacgctgttcgcgcccggggacgaggtctggtacgccggcgcgctgggccgggccggcagcaacagtgaatatcagctggtggatgagcgcctggtggcgcacaaaccgcgcaccctcgataatgcctccgccgccgcgctgccgctgacggcgatcaccgcctgggagctgctgtttcaccgtctcggcgttgaggaaggcggcaatgcgggcgacacgctgctaatcgtcggcgcggcgggcggcgtggggtctatcctgacccagctggccagtaaactgaccgccatgacggtgatcggcaccgcctcgcgtccggagagccagcagtgggtccgcgaggcgggcgcgcaccatgtgatcgatcacagcaagccgctcgccgacgagctggcgcgcattggtatcacgtcggtaacccatgtcgccagcctgaccaataccgagcagcacttcaacgcgctgatcgacgccctcgccccgcagggcaagctggcgctgattgatgacccggagaccctggacgtggtgccgttgaaagcgaaaagcctgtccctgcactgggaatttatgttcacccgttcaatgtttgagacggatgatatgatcgcccagcatcagctgctcacccgcgtggcggcgctgatcgacaaccacactatcgaaaccacccttggcgaacactacggcgccatcaccgccgccaatctgcagaaagcgcatcgccagctggaaaccggacgcgccgtcggcaagatcgtgctggaggggttttaagatgatatcgcttatcgccgtgctcaaggcgaaaccgggccaaacggacgccctgcgtcaggccctgcaggcgctgctcctgccgacgagacaggagccgggcaacctcgactatgccctgtttcagctgcgcgacgcgccggacaccttctatatgcgcgaggcgtggcagggacaggacgccctcgatgcccatgtcgcgatgccctattttcaggcgtttatggcgcagatggagtctctgctggctgagccgctgcggctggactttctgacgccggttgagccttagcccaccggctgacgaggggtgggaaaatcacgcccctccgccgcgcgggtttaaaagtgggcgggaagcgggtgggttatcttttccagcaccccgcgatggaccgtaatgtaaccacctttgcgcagctctgccagaatcgacataacacggctgcgcgacaggttggtgcggcgctgtataaagcttaacgcattaatttggcgacgatactcctccgggtagtccgccagctctgttagcagggttcgcaccatcggataagaatccacccccaccatctcctgcgaacgcatgctcaacaccatcagccgctgcgccagaacatgggccatctcctgccacaggttttgcgcattgaggatctcgaccgcggcctggtgtcctatccagcgtccgcgcaaatctgtctcagcaaacagagagcagtggtgtttttccggaataccgttaaagacgccgtaaccatcgattaatcccaatagcgaaggggcaaatatcgttgatatcaccatgttgttttccgcatggcatagcgaggcaatcccctcttcgagcagaattaatccggattcagcctgggtcggcggaaaacgataataggtcgatcgcggcagcgcaaagggtgagctggcgggcaggaacgcagataacagggattccaccgcgaataacggctttgtctgtcttccgtaataaaaagacggtaacgcctggtcagtagagaggctggctgcagggatcgacatggtttttatgccatcaggtcaggttgaaaaagtgattcgttgagaatcatagtatcaacaggtgaattaacgaataaaagacaagacgttacgaggataaaaagagtgtaagcatcattatctgcaataactatttatctctattttacaggaataaaaaatacgatgagccttaattacctataaggcttagcggcgataaagataaggccaccttattatttactgcgctggctaacgccgcgcctgagggtttctctaccgctttccccctcgcatctcggccagtccaggctacgcttatcgatgccactgaccacccgcattcccctcccgttctattgagtccattcatcaagaagaggtttcgctatgctgatcaacgctattggtacctactccgccagccagccgctggaatcaatggccatcacccgccgcgacccggggccgcaggatgtacagatcgccatcgcttactgcggcgtctgccactccgatctccaccaggcgcgatcggaatgggcgggaacgctgtatccctgcgtgccggggcatgaaattgtgggtcgggtgaccgcggtcggcaacgccgtctcgcgctacgccgtcggcgatctggtgggcgtcggctgtatggtcgatagctgtcaacagtgcgaagagtgcgctgaggggctggaaaactactgcgaccacatggtgctgacctataacgggccgacccaggacgcgccgggacacacgcttggcggttattcacagcagatcgtggtcaatgaacgctacgtgctgcggataacccatcccgaagcgcagctggccgccgtcgcgccgctgctgtgcgctgggatcacgacatactcgccgctgcgccactggcacgtcgggccgggtaaaaaagtcggcgtggtcggcatcggcggcctggggcatatggggatcaagttggcccatgccatgggggcccacgtggtggcctttaccacctccgaatccaagcgtaatgcggccagagcgctgggcgccgatgacgtggtggtgtcgcgcaacgacgacgagatggcggcccacgtcaaaagcttcgacttcatcctcaacaccgtggcggcgccgcacaatctcgatgccttcaccacgctgctgaaacgcgatggcaccatgacgctggttggcgccccggccacgccgcatccgtcgccggaagtgttcaatctgatcttccgccgccggtcaattgccggctcgatgatcggcggtattccggaaactcaggagatgctcgacttctgcgccgaacacggcatcgtcgccgatatcgagctgatccgcggcgatgagatcaacgaagcctgggaaagaatggtcaagggtgacgtgaaataccgcttcgtgatcgacagtgcgaccctcgccggctaagcgccgcgacgaaaggtacgccgccattccgtcgggctgacgccaaagcgcgctttaaactgctggcgccaggtgaccgctgaaagatagcccaccgcctccgccacctgctcgaccggcagatcgcccgcctcaagcagagtctggctgcggcgcagacgttcggcggtcagccagtcggtaatgctcatcccggttgcccgggcgaagtggcgggtcagggtacggcggctcatcgccaccacccgggccagcgaatcgagactgtgcggctcggcaatatgctgctgcagataatccagcaggcagttgattcgcgcatcgcgggtgtttttcggcaccggctgggcgataaactgcgcctggccgccctcgcggtgcggcgaaacaatcatccgccgggcgatctggttggccgcgaggctgccgaaacgctggcggatgatgtagaggcaacagtccagcgccgccgcggtgcccgccgaagtaatgatccgctggtcgtcgacgtacagggcgttgatatccagctgcacctgcggaaaccggcgctggaaatcctgctcgaactcccagtgagtcgccgctcgcctgccgtccagcagcccggcgtagccgaggacgaacgcgccgaggcacaggccgacaatctccgcgccgttatcccgggcccgcaccaggctatcaagcagcgcctgcggcggacgtcgatcgacctcgccccagtaaggcaccaccacgatatccgcctgttccagcgcggcataatcgccggtggcgtacagcgcaaaaccatcgcgggcgcgcagcagccccggccgctcggcgcaaatgtgcagattaaagcgtttgatttccgaaaccgaatcgccaaacagcatgcaggggacggcgtagtgaaacgggctaaagccctctacagcgacaatcgccacgtcggtgagtttcatcgtcccttccccttacgcatgttaataaaccacggtttctccatcctgcgggatagaaaccacatcggcaatctgattatccagcgcatactggcgcatctcttcccgactcaccaggcagtggttgaccgcctcgaggtggatagccatgatttttgcttccggcagggtgaagtgcacgttcaggagatcttccttgcccatgataatcgggccaaagccgatgacgtgggcgtagccggcgttgaggaccaccacgtccgggcgcagcttcagcaggtcggctgcaatgtcatcgcgccagatagtatcccccaccagccacagcgtcttctcctgcggatggcgaaacaccacgccgcaggcctcgcccaggcgttcagccatcgccggcaccgcgtaggtgcggtcgctgccatgctgcccggaggtggttttcagcagacgcacgccggcaaattcgctgtctgccgacagcaggcgcagatcctgaaatccctggctgcgcagcagcgcggcgtcggcctcatgctggacgaacaccggcagggttttcgggatcgcggcgatcgctgccgcgtcccagtgatcgtcatgggtatgggtgacgatcaccgcatcaacgtcgataattttatcgcgggaaaacggcagctcaaccagcggattacgcagttcgctgcgcgcggtgcccggaaaacccggccaggcgcctttgtccgccagcatcggatcgatgagaaatcttttcccggcgtagtgaataatctgggtcgcattacggatgtgggtgatgttcatgttggcgttcctctggggtcatctgacgaacatcgtactgagtccccgcctggctcaacaggggcgtttgggcaatgatcgatgaaatcgggccaacctgcggcggttgccatccgcctccggctatgttgttcttaaggctcaatttttgacaggagtggcaggatgaaaaagaaactgaccgccgccgatatgcacgacccgcaggtcatcgccgagacgccgtggttcagcatgcgtaaggtgggtattgatgtcgcccccggcgagcgccgcgacttttattccattcattacccgcgcccggcggtggggattgtggccatccaggatgagaaagtgctgctgattcgccactaccgctacctgatcgataaggtggtgtgggcgatcccttctggcggcgtcgatgaaggggaagacccggcggtcgccgcactgcgcgagctgcgggaagagaccggctggcaggcgcaacgcgttgaggagatcattcgctttaacccctcctacggcagcagcgatcagctgtttatcacctggctggccaccggtttacgctgggtggggatggatgcagagcaggatgaggtgatggagaccggctggtttaccttcgacgagataaaccagctgatcgcccacggcgagatgccggacgggctgtcgctggtgccgctgctgcagctgatggcgcagcggcgaagcggctcgcttacggcttaagcatccgccagcggaaccacagctgggccacgaggatcagcacgccgccgataatcttctgcagcggcagctgttcgccgtaccacagcgcggcggcaatgaccgtcagcagcggttcgagcaccatgatgatcgccgcgctggccaccgccgcgtacttctgccccttcatctgcagaccgaagcgcaggctggtagcgatgacaatgctggccaccaaccagccgagagtcggcagggtcatcggctggtcccagcgttcaacggcagcggagatggtcaacccgacgataccggtgatcgccagctgcacggtggtcagggggatcagcggtacttcacgcgcgcagcggctggtgtaacagaaccagatcgactgcaccagcgccgtcagcaaaaaccagccctgactggggtggaaggctatcggcatatgcagactgagcagccccaggcctaccaccgcgatcggcaggcactcccaccaggcgcgaggcgggcgcactttcatcatcacccatgcggtcagcgggacgaacatcatcgacaggctcatgataaacgccccttcgccgagcgacgccgtcgtggagaccgaatagatccacaggcagaggttgagcgcaaaccagagtccgctgatgatgagttttggccagtgctgcttttgcgggcgaaaaccgcggcagaacggcagcagaagcagcgcggcgaagaaaaaacgcagcccaagaaacgcgaacaccggcatgccggcgatcgcctcgcgggaaaatatccagccgcaggcggcaatcaccgtcgcggcaatcagcagcaggtcagcctgccgttggcgtaccatacgcgcctctccctgtgtgttggcttaccagccaggcaccgcgccgccgttgaagatagtctctgccgccttcgccacctccggcgactggtacgactgcataaactccttcacgttttccgcgtctttattgtcttctcgggtcacgatgatgttcacgtagggcgagtttttatcttcgataaagatgccgtcacgaaccggcgacagcccggtttgctgcaggtaggtggtgctgatgatagccacgtcgactttgggatcgtcgagtacgcgcggcagttgcgccccttccagctccatgatcttcaggttatgcgggttgtcggtgatatccaccgccgtcggcagcaggccggtcccggctttgagggtaatcagcttctctttttgcagcagcagtagcgcccgcccgaggttggtcgggtcgttgggaatagcgatcgtcgcgccgtctttcagttcggcgactgacttgatcttgcgcgaatagccggccatcgggaagacgaaggtattcccgaccgccaccagatgatagttatgcgctttgttgtcctgctcaaggaaaggccgatgctggaagacgttggcgtccagatccccggcgttggtcgactcgttgggcagcagcgagccgctgaaccccaccagctcgacctccagaccgtacttctctttggccaccttcttcgccacttccgctacatcctgctcggcgccgttaatcacaccgaccttaatgtgcttcgcttcattacccttttggtcgcagccgaccagcgccagacccgccagcattaccgcggcggcggcccgtaaacgtaatctcatcctcttcaccctgtctgtcctgaatgtcattgtttttttcgtacaaaactatagcgactttcgggtcgggtaataaacagcaaaccacgcaactggaaataaaatcatcttcgcgaaacgcgaggcgctagccccggcgccactcgcccggcgtcacgccatagcgcattttgaagcgcttcgagaaggacgccagcgactgaaagccgcagcgttcggcaatgacctcgaggttggtctgacgctccaggcgcagcagccgggcggccagcgccattcgcagctgcgacagccacgcctgcggcgtcaggtgataaacgcgggcaaaatgacgggcgaaggtggcccgcgacagaaaggcacgggcggccatactctccagcgtccacggttgctccggggtcgccatcaccgccagcaccgccggcatcaggcgttcatcgctcatcaggcgcagcagcccgccgggcggctgttgctcgccaagcagcatgcgcagcaggagcaccagcagcgtatcgccgaggctgcgcacgatagcgctgccgccgggacgctgcgccaggctctcgcgcaccagtatattaagcagcgcgtccagctccgggcagtcttcacgcgcatcggtatggagatggatcagcgtcgatgcttcactgaacagccagctgacgtgcggaccaaaatagaattcgccgcacagcatctccagcgccccctccgccgggccggcgcgcatttccgtcaccgtgccgttaaaccggtgcgccaccggcagcacctggccccactccaccaggctctccatcaggtgcggcgaaccgtggggcaggaggacgacatctcccgcgcgcaggtgatgggtctggccgccgacgttgagccgcccctcgccgcgcagcaccacgtgccagggcaccacgccgctgcgcatttgctggtgcccggcctgccagcggccgccgaagcgacagtgcaggttcacttcgcagcgcggcgccagcagcgccagcagatgactgagactgtccatgcttctcctgagacgataagacaaaaaggtgagacgaagaccgccagtctagcatgcggcaagcgcctaagatgaccccattgccaacacaccctcgataacaacaggagttaaccatgagccgtttagcagatatccgtgaacaagacgccaccggcaaagccgccgatattttcgccgggatcaaaaaagcgatgggcaaagtgccgaacgcctacctgaccatcggcggccactcgccggcggcgctgcagcaggcgctggcgcacaatgcgatgctccataaaggcagcctcagcgcccaacagctggaagcgattaacctgtcggtcagcgaagccaccggctgtgactactgtctggccgcgcataccctgatggcgaaaaaagccggcttcagcagcgaacaaatccatgccctgcgccgcggggagtatgcggaagaggcgcagcttgatgcgctggtgaaattcgcgcagaccctggtgaccaccaccggtacgctgccggaagccgacgtcgccgcgctgcgcaacgccggttttagcgaccagcaggtgattgagattatcagcgccatcagcgccatcctgttcaccaacatggtgaaccgggttaacgacacggtggtcgacttcccgaaagccgattaatccgtcgcgcagcgccggttttacagccccagatcgctgagccccggatgatcgtccgggcggcgcccctggggccagtggaacaggcgctcgctttcggcgatcggcagatcgttgatgcaggcgtagcgcgtctgcatcaatccgtgcttatcaaactcccagttctcattgccatacgagcgaaaccagttgccgctgtcgtcgcaccactcgtaggcgaagcgcacggcaatgcgattctcctgccatgcccacagctccttaatcagccggtattgctgctccttgcgccattttcgctgcaggaactcaacaatttgcccccgaccgtggacaaattcgctgcggttgcgccattcgctatccacggtgtaggccagggcgactttttccgcatcgcggctgttccagccatcttccgcggcgcggaccttctggatagcgctgtcgcgggtaaacggcggtaacgggggacgttgttcggtcatgcttactctcctctacgggctaattgctgctgcaggcgctgattctcctgctccaggtcatgaatacgttgctgcaggttctggctgtactccgccacctgctgcgcgctgtagcgcggcgtaatgtgctgcgggcagttccagtcaaacgcctgcaaatgaaaaagaaacagacgttcaatgcgggcgcgatagttggccggcgccacctgcgccagcagctgcgggtggtcctctgccgccaggacctcgacggcggcgtagattttcagcctggcacggcgcggataatccatcaaaaacaggcaggcccggtcgctgccgcgcagattgccggtagtaatgtactggcggttaccgccgaaatcggccatcgccagggtggtgtcatccagcagatgcagaaaccccggcgggccgccgcgatgctgaatgtagggccagccgctctgcgacaccgtcgccagataaaagctgtcgcgggtggcgatcatccccgcttcgctgtcgccgaagcggtcggcctggcggcgactgcgcggcgtttgccacagcgagtcgctgcccatttcatgctgcacatccatcacgtccggggtgatagcgatatcgagaaaggttgctgccatagcgcctcctgttgtctggcgccatcatggactgtactgtgaagaatgataatacgggtaaagtggcaatcatctttccgaaaaacgggagaataatggatcgattaagcgcgatggcgctgctggtgaaagtgaccgagctggggagcatgtcggcggcagcgcgggcgctgaatatgccgttgaccaccgtcagccgccatattggcgaactggagagcgcgctgggcgtacgcctgctggcgcgaaccacccgcaaactgacgctcaccgacgccggggtcgattatgttgccgccgcccggcggatccttgaggaggtggaaaacgccgaacgccaggcgacgggcgaatatcaggagccaaagggtgagctggtgatctccgcgccgacgatgtttggacgccagcacgttcttccggtaatcagtgaatttatcgcccgctacccgctaattcgcgtccgtttgctgctcagcgatcgcaatgccgacctggtgagcgaccatgtcgatctggcggtgcggattggcgacctggcggacagcagcatggtggccacccgcctcggcaccatgcggattgtggcctgcgcccatccggcgctgctggcgaaatacggcgagccgcagcggccgcgcgatctggcggcgctgccgatcatccgcattgaatcgccgatgccctatcgcggctggcgctttcgcgccgctgagcgcgaggaccagctgattaacctgccgccggtgctatccgtcaccacgccggagagcgccgccgatgccgcgcggctgggggtgggggtggcccgcttactgcattatcaggcgctggatggcctgcgccacggggagctccgtctgctgctggaaaacgtcgagccggatccggcgccggtccatttgctgtataccgctcgggatctggcgccgcttaagctgcgcaaatttatcgattttgccgcaccggcgctgcgtcaggcactgttgcgcatcgccggggccgcttaatgcgtcgcggtcttcagcggcgcctcctttaacagccatgagaggacaaacgccaccgccataatgccggccgccatcagaaacgccgcgtggatcgccgcgccgaaggcgtcgaggtagtcgaggcggatatccgcgggcaggtgctggaccgccaccggattcattcccggcggcagcaccgcgccttccggcagcagttgttgcagtttgctctgcagcacatgcgtgaacaccgcgccaaacagcgccacgccgatggagccgccaatcgagcggaacagggtcacgccggaggtggcgacgccgtacatctgcgccggcatcgcattctgcaccgccaggaccagcacctgcatcaccagccccagacccgctcccagcacgccggtaaacaggtacagctgccacagcggcgagtgaatggtgatgcgggtcagcagtaccatgccggtcacgccgagcagggtgccgaggatcggaaacaggcgatatttaccggtacggctgataatccgcccgctgataatcgaggtcagcagcaggccgcccatcagcgggattaactgtaacccggcctcggtgggcgtcgcctccttcaccacctgcagatagagcggcaggaaggtgactgacccgaacagcgacatgccgatgacgaagccgatcaggctgcacagcaggaagctgcggttgcggaacagcgccagcggaataatcggctcggcggccatccgttcttcgtaaataaagccgatgatccccacgatgccgaaggccagaatgcaccacagctgcgggtcattccacgcatggacgctgcccccttccgaggtaaacaggatgatgcacagcagcgccatgctgagataaatcgcccccagccagtcaatctgatgctggctgcgtttattgctgctgtggaataccgcgccgatcaccagcagcgcgaacaggccgagcggcaggttgatatagaagatccagcgccaggaggcgtgctgcaccagaaaaccgccgatcagcgggccgatcaccgtcgccaggccgaaaacgccgccgaacagcccctgatagcggccgcggttggcgggcgggatgacgtcggcgaccgccgccatgctgatcaccatcaggccgccgccgccgagcccctgcaggccgcgcatcagcaccagttgggtcatattctgcgccagcccgcagagcgcggagccgacgagaaacagcccaatcgccacctgcagcacgattttgcggccgaacagatcgccaaatttaccgtacagcggcaccgcgatggtggagctgaggatataggcggtgaccacccaggaaagcttgtccagcccgcccagttcgccgacaatcgtcggcagcgcggtggagacaatggtctgatccagcgctgaaagcagcatcaccagcagcaatgcgctgaacaggaggcgtatcgactgcaccggtgggttagcgacttgagaagtcattacaacgctcgcttgaaattaattaaatgcataattaatatttagtgaaagaatgagtcgggtcaagagatcgccatatcatgacagcacaaaaggatcaggatgctccccgccgcccgggtcggccgcgcggtaaaaaaccgggtaccgccaaccgcgaacagttgatggacatcgccctgacgctgtttgcccgcgacggggcgggccgcgtatcgttgaacgccatcgccaaagaggccggggtgacgccggcgatgctgcattactacttcagctcgcgggatgcgctggtgactcagctgattgaggagcgctttatgccgctgcgcaatcacatcagccgcatctttgtcgatcatccacaggacccggtactggcgctgacgatgatggtcgagacgctggcgcatatggcggagaaaaacgcctggttcgcgccgctgtggatgcaggagatcatcggcgaaatgccgattctgcgccagcatatggatgcccgcttcggcgaggagcgttttcaggtgatgctggggacggtgcgtcgctggcagcaggaaggcaagatcaatccggcgctggcgccggagctgctgtttaccacggtaattagcctggtgctggtgccattttcacgcatccacagcgatccgcgtttacaggcggtcaaccgtcagaccatcgtcagccacgcgctggcgttaatgggccacggcgttggaggttaaggcgtggttttgacgcttttgtagtccggataagacaccacgcgccgccatccgggattttccctgctcgcgctacgcttagcagggctacaacttctatgttaattcccggcagattgcgctcccggttgatcttctgcgttatgtctcttatgccgcagggagcgcacagcacgaaccgtaggccgggtaaggcgacagccgccacccggcaagaatacaggtgccgtgcctgatatcctgcccggcggcgttgcgcttgccggtcctgggtggggcgaaactacgggaggactgtgtaggccggataaggcatttatgccgccatccggcacaaccacaggtacggtacctgaccgcccggggataccaggatcgttacagcgccttcgacaaatagtggcgctgcatgcctgcgtgcgggaagtcgggcagcgacatctgcagctgatagcctaatttctgataaaacggcagcgcctggaagctaaaggtatccaccagcagatggctgcagccttgcgcctgcgcctgctgttccgcctcctgcatcagctcgctccccagcccgcgcccgcgcgtcgtctcgctaacccacagatactcaatgcacagccagttgcccttgcgtttggcaatcagcccgccctgcattaccccttgcgcatcgcgcgagtaaatccccagatcgccaaactgcgccgcatcgagatactgctgattatactgccgtagaccggcaaacaattcttgttgatcgtcgggattaatgctttttgtaatgattagtgtcattaactatctccagtatcgcgctgccgaatggttattttccctctccactttcacaaaatattcttattttctccatgattatttgccttaattttttgcgttctaaaagtaagcaaaaaaacctttccattatcgcgacggatcgtataatggggaaaaatgagaatgatcattctcactacaaaaccagaggagatgcgcttttcacctcctgaagaccgaagaggttggcttcagcgaagacacaataacaatcacgttcaggaacatctgtgttccttttttgtcattttcgctcacccgaaaatgcctcagcgcccaacctattccctcgtttttaaataaacggggcggacgtcttatatcttgagaaaatataatgaaatacatcatagctcccatcgcgacagcattatttctccttagcggatgcgataatgcgcagacatctgctccgcagcaacccacgccggaagtgggcgtggtcaccctgcaaagccagccggtgccggtagtcagccagctcaccggccgcaccaccgcctcgctcagcgccgaagttcgcccgcaggtgggcggcatcattcagaaacgcctgtttaccgaaggcgatatggtgaaggccgggcaggccctttaccagatcgatccctccagctatcgcgcgacctggaacgaagcggcggcggcgctgaaacaggcccaggcgctggtggtctccgattgccagaaggcccagcgctacgcgtcgctggtcagggataacggcgtttcccgccaggatgccgacgacgccgcctccacctgcgcccaggacaaggccagtgtggaatcgaagaaagcggcgctggagagcgcgcgcatcaacctgaactggaccaccgtcaccgcgccgattgccgggcgcatcggcatctcgtcggttacgccgggggcgctggtctccgccgatcaggataccgcgctggcgacgatccgcgggctcgacaccatgtatgttgatctgacgcgatccagcgtcgatctcctgcgtttacgcaagcaaagcctggccagcaacagcgacaccctcagcgtgacgttaaccctggaagatggcagtacctatcccgaaaaagggcgtctggcgctcaccgaagtcgccgtcgatgaatctaccggctcggtgaccctgcgcgctatcttccccaacccgcagcacgtcctgctgccggggatgttcgtccgcgcgcgcatcgatgaaggcatcatgaacgacgcgatcctcgccccgcagcaggggatcacccgcgatgccaaaggcgacgccacggcgctggtggtcgatgccgccaacaaagttgagcagcgtaccgtggaaaccggcgacacctacggcgataaatggctggtgctgagcggcctgaaagcgggcgacaaactgattgtcgaaggcaccggtaaagtggccccaggacagacagtgaaggccgtcgccgtcaacaataacggaggcaacgcctgatgttctcccgtttcttcgtgcgtcgcccggtctttgcctgggtgatcgccattctgattatgctcgccggggtgctggcgatccgcacgctgccggtaggccagtacccggacgtcgccccgccggcggtgaaaatctccgccacctataccggggcgtccgccgaaaccctggagaacagcgtcacccaggtgatcgagcagcagctcaccggcctcgaccatctgctctacttcagctccaccagcagctccgacggctcggtcagcatcaccgtcacctttgagcaggggaccgacccggacaccgcccaggtgcaggtacaaaacaaagtgcagcaggcggaatcgcggctgccgagcgaagtccagcagtccggcgtaacggtggaaaaatcgcagagcagctttctgctgatccttgcggtgtatgacaaaaccaaccgcgccaccagctccgatatctccgactggctggtcagcaatatgcaggacccgctggcgcgcgtggagggcgtcggcagcctgcaggtattcggcgccgaatacgcgatgcgcgtctggatggacccgaccaaactcgcctcctactcgctgatgccttccgacgtccagtcggcgattgaggcgcagaacgtgcaggtttccgccggtaaaatcggcgcgctaccgtcgtccaatgcccagcaattaaccgccaccgtgcgcgcgcagtcccggctgcaaacccctgaccagttcaaagcgatcatcgtgaaaagccagggcgacggctcggtagtgcgcctgagcgatgtcgcgcgggtggagatgggtagcgaggattacaccgccaccgccaatctgaacggccacccggccgccgggatcgcggtgatgatggcccccggcgccaacgcgctggacaccgcgacgctggtgaaaagcaaaatcgccgaattccagcgtcagatgccgcagggttacgatattgcctatccgaaggacagcaccgagttcatcaaaatctcggtcgaggacgtgattcagaccctgttcgaagcgattatcctcgtcgtctgcgtgatgtatctgttcctgcagaacttccgcgcgacgctcattccggcggtggcggtgccggtggtgctgcttggcaccttcggcgtgctggccctgttcggctactcgattaacaccctgacgctgttcgccatggtgctggcgatcggcctgctggtggatgacgccatcgtggtggtggagaacgtcgagcgcattatgcgcgacgaagggctccccgctcgcgaagccaccgaaaaatcgatgggcgaaatctccggcgcgctggtggcgattgccctggtgctgtcggcggtgttcctgccgatggccttcttcggcggttcgaccggggtcatctatcgccagttctcggtaaccattatctcggcgatgatgctgtcggtggtggtagcgctgaccctcaccccggcgctgtgcggcgcgctgctcagccactccaaaccgcacaccaaagggtttttcggcgcctttaaccgcctgtgggggcgcacggaggcaggctaccagcgccgggtgctcggcggcctgcgccggggcgcagtgatgatgggcgcttacgcgctgatttgcggggcgatggcgctggcgatgtggaagctgccgggcagcttcctgccggtggaggaccagggggagatcatggtccagtacaccctgcccgccggggcgacggcggtgcgtaccgccgaggtgcgccgccaggtcaccgactggttcctcaccaaagagaaagccaataccgatgtcattttcaccgtcgacggcttcagctttagcggcagcgggcagaacgccgggatggccttcgtgtcgctgaaaaactgggcgcagcgcaaaggggacgacaacaccgcccaggccattgccctgcgcgccaccaaagagctggggacgatccgcgacgccaccctcttcgccatgaccccgccgtcggtggacggcctcggacagagcaacggcttcaccttcgagctgatggccagcggcggtaccgaccgcgacagcctgatgaagctgcgcagccagctgctggcggcggccaaccagagcagcgagctgcagtcggtgcgcgctaacgatctgccgcagatgccgcagctgcaggtggatatcgataacaacaaagccgtctcgctggggctgtcgctgagcgacgtgaccgatacgctctccagcgcctggggcggtacctacgtgaatgactttatcgatcgcggccgggtgaaaaaggtctatatccagggcgaaagcgacgcgcgcgcggtgccgtcggaccttggcaaatggttcgttcgcggcagcgataacagcatgacgccgttctccgccttcgccaccacccactggcaatacggcccggaaagcctggtgcgctacaacggctccgccgcctttgagatccagggcgaaaacgccgccggcttcagctccggcgcggcgatgaacaagatggaaaagctggccgacagcctgccggcgggctccacctgggcgtggagcggcatttcgctgcaggaaaagctggccagcggccaggcgatgagcctgtacgccatctcgattctggtggtgttcctgtgcctggcggcgctgtatgagagctggtcggtgccgttctcggtgatcatggtcatcccgctcggcctgcttggcgcggcgctggcggcgacgctgcgcggcttaagcaacgacgtctacttccaggtggcgctgctgaccaccatcggcctgtcgtcgaaaaacgccatcctgatcgtggagttcgctgaatccgccgtggatgaggggtattcgctctcccgggcggcgatccgcgccgcgcagactcgcctgcgcccgattgtcatgacctcgctggcgtttatcgccggggtgctgccgctggccatcgccaccggcgccggagccaacagccgcgtggcgatcggcaccgggattatcggcggcaccctgacggccaccctgctggcggtgttcttcgtaccgctgttcttcgtgctggtgaagcgtctcttcacccgccaacgtccttctcaggagtaaggtatgtttcgtgtaagttttatgtttatcgcgctcctgaccgcgggctgcgtctcgcttgacccgcattatgatcgcccggccgcgccggtgccggccaccctgcccggggcgcacggcgaatcgacggcggtggtcggcgactggcagaaagtggtcaatgatgcgcggttaaaaaaagtggtcagcatcgcgctgaacagcaaccgcgatgtgcaaaaggcattggccgatattgaagccgctcgcgcccagtatggcgaaacgcgggcatcgctgtttcccaccgttgatgccgaactgagccacacccgcagcaaaacggtggccagtggcctgagctccgcttcacaggccgacggcgcggtctccagcttcgaactggacttgttcggcaagaaccagagcctgtcgcgcgcggcgcgcgaaacctggcttgccagcgaattcaccgcgcagaatacccggctgacgatgattgccgatttgaccaccgcctgggtgacgctggcgacggataacagcaatctggcgctggcgcagcagaccatggacagcgcggcaaactcgcgcaacatcgtcgcccgccagatggcggttggcaccgcctccgcgggtgatttaagctcggcggaaagcgtctatcagcaggcgcgcgccagcgtcgccagctatcgcacgctggtggcgcaggataaaaacgccattaacctgctggcgggggaaaccgtgccggagagcctgctgcccggcactctcgagagtctcggggataacagcatcgcgctggtgccggcgggcgtgtcgtcgtcggtgctgctgcgtcggccggacattcaggaagcggagcacaatctgaagagcgccaatgccgatatcggcgcggcgcgggcgaacttcttcccgtcgatttccctgaccgccagcgccggggtcggcagcgactcgctgtcgtcgctattcagccacgggatgcaggtgtggtcgttcgccccctccatcagcctgccgctgttcaccggcggcagcaacctggcgcagctgcgctatgcggaagcggagaaaaaggggctgatcgccacctacgagaaatcgattcagagcgcgtttaaggacgttgccgatgcgctggcgcgccgggaaacgctgagcgaagagcttgatgctcagcggcagtatgtcgccgccgagcagacatcgctggatatcgccatgaagagctatcaggccggggtcggcgattatctgtcggtgctcaccgctcagcgcacgctgtggtcggcgaaaacgacgctgctgtccctgcagcagaccgacctcaataaccggatcaccctctggcagtcgctgggcggcggcgccagttaaacttacccgccgggcgaccgagcccggcctctacaaggaatcgttatggcacgtgtttccctctcctgggcgctgatcctcggcctgctgtcgggtatcggcccgctgtgcacggatttttatctaccggcgctgccggagatcactcagcagctgcaggccaccagcactcagacccagctgtcgctgaccgccgcgctgattggtctcggcctgggtcagctgtttttcggcccgctgagcgaccgcattggccgcctgaaaccgctggcgctgtctctgctgctgtttatcttctcttcggcaatgtgcgccctgacccgcgatatcaacatgctgattgtctggcgctttttacaaggcttcgccggcgccggcggctcggtgctgtcgcgatccatcgcccgcgataaataccagggcaccctgctgacccagtttttcgccctgctgatgaccgtgaacggcattgcgccggtgctgtccccggtgctgggcggctacgttatcaccgccttcgactggcgaattctcttctggacgatggccgccattggcggcgtgctgctggtgatgagcctggcgatcctgcgggaaacgcgcccggccacagcggcgcatgccagccgccaacggcccggccagccggtgctgaaaaatcgccgctttctgcgcttctgcctgatccaggcctttatgatggccgggctgttctcctacatcggctcttcttccttcgtgctgcagagcgaatacggcatgagcgccatgcagttcagtctgctgttcggtctgaacggtatcgggctgatcatcgccgcgatgatcttttcccgtctggcgcgccgctttagcgccgaaagcctgctgcgcggcggcctgacgctggccgtgagctgtgcggcgatcatgctgctgtttgcctggctgcatctgccggtgctggcgctggtcggcctgttctttaccgtgtcgctgatgagcggcatcagcaccgtcgccggcgcggaggcgatgagcgccgtcgacgccgcgcagtccgggaccgcgtccgcgctgatgggcaccctgatgtttgtcttcggcggcatcgccgcgccgctggcgggtctcggcggcgaaacaatgctgaaaatgagcctcgcaatggccatctgctacctgctggcgctgctgctgggcctcagcaaaccgcgcgacgcacgctaatctcctgctgcggtaataaaatattccagatttattaccgcactatttcccgccatatctaccattctcgtattattttccgcgtactaatcgtgatactcttcacaggaaaggaataaataattccttatactgcgcgccactgagaataacgaggtttctatgagtatcgacctgagcaaactgctgaccgagcgacgtaacgccaacagcgccaacattgacaccctctccaccctcgagatgctgacggtgataaaccaggaagaccagcaggtagcccaggcgataacgccctatctgccgcagattgccgaggtggtggataaggtcgcggcggcgctgcaggccggtggccgcttgatttacattggcgcgggtacctcagggcgtctggggatcctcgatgccagcgaatgcccgccaaccttcggcacccgcccggagcaggtggtggggatcatcgccggcggacataaagcgattctcagcgccgtggaaaacgtggaagacaacaaagcgcagggggcgatggatctgcagaacctgaacttcagcaaccgcgatgtgctggtgggactggcggccagcggacgcacgccgtacgtcattggcgccatggaatacgcccatagtcagaatgcctttgtcgccatcgtcagctgtaacccgcatggcgaaatggcccagctggcggacgtggcgatcaccccggtagtcggcccggaagtggtcactggctctacccgcctgaaagccggcaccgcgcagaagctggtgctgaacatgatctccaccggggcgatgatccgcgtcggcaaggtgtacagcaacctgatggtcgacgttgaagcgaccaacgccaagctgattgagcgccaggtctctatcgtgatggaggccaccgactgcgatcgcgccaccgcccagaaggcgctggaggcctgcggccgccactgtaaaacggcgatcgtgatggtgctggcggacttaagcgccgcagaggcgcagtcgctgctggcgaaaaacaacggctatatccgcaaggcgctcagcaacacctgagcgccgacagacaggtaacgggcaatggcaaaaataacgaaagagatgatagcgcggatcctcgcccacgtgggcggcgccgcaaacgtcgcgcaggcgggcaactgcatgacgcgcctgcgcttgaccctgcgcgatgaaagtctggccgacagcgccgccatccgccagattgacggcgtgatgggggtgatcgtcagcgacgagcagttccaggtggtgctcggccccggcaaggcgcaaaccgccgccgaaatgatgaacggcctgctggaggcggcgcccgccgccgcgccgacgctggccgacgtcgcggcggagaaaaagcaggcgctgaagggcaggcagaccagcgcggtgcagaagtttctcgccaaattcgccactatctttacgccgctgatccccggctttatcgccgtcgggctgctgctgggcttcgccaccctggcggaacaggttttcgtgctggagaacgcccatccgaacgccagcctggtggcgctgattggctatatgaaggtcttcagcaaagggatgttcacctttctgagtatcctgattggctataacgcgcagaaggcgttcggcggctccggcgtgaacggcgcgattatcgcctcgctgttcgtgctgggctacaacccggaggcaactagcggcttctacgccggcatttccaccttcttcggccatggcatcgatccgcgcggcaatatcatcggcgtactgatcgccgctatccttggcgcgtgggttgaacgccaggtgcggcgggtgatgccggccaacctcgatatgatcctcacttcggcggtgacgctgctgatcatgggcgcggtgacctttacggtgatcatgccgattggcggctggttgtttaccggcatgtcgtggctgttcctgcatcttaacggcaacccgtttggctcggcggtgctggccggcctgttcctgctggcggtgatgttcggcgtccatcaggggtttgtcccggtctattttgcgctggtggacgcccagggctttaactcgctgttcccgatcctggcgatggccggggccgggcaggtgggggcggcgctggcgctgttctggcgggcgaagcgcgattcgctgctgcgaacccagattaaaggggcgattattccgggcttcctcgggattggcgagccgctgatctacggcgtcaccctgccgcggatgaagccgtttgtcaccgcctgcctcggcggcgcctgcggcgggttcttcgtcggactgatcgcctggctggggctgccggtcggcctgaacacggtgttcggtccgtccggtctggtggcgctgccgctgatgacctccggcagcggaatttacgccgggatggcggtctacgccggcgggctggcggtctcctacctgtgcggttttgtcctcacctggctgttcggcagtaaaaatgtcgatttaagctagaacgcgactatcggttaatgcccggcggcggcttcgccttaccgggcctgcaaaatagttacgccgccgcgcccgactaccatttcctgccccgccgcccgggcgcgcgcatgctatgattcccctttgtcatatttcgcttgaggaaaagatgggctccagcaaaaaagggatgctgaacgtactgattgccgccgtgctgtggggcagttccggggtgtgtgcgcaatttattatgcaggaaagccagatgtcgtcgccgtttctgaccatgacgcgtctgctgttcgccgggctgatcctgctgatgctcggctttgttcacggcgaccgcattttccgcgtgctgcaaaaccgccgcgacgccctaagcctgctgtttttctcgctgtttggcgcgctaaccgtgcagttcacctttctgatgaccattgaaaaatccaatgccgccacggccacggtgctgcagtttctgtcgccgacgatcatcgtcgcctggttcgccctcgcccgcaaagcgcgtcccactccgctggtgctgggggctatctgcacctcgctggcgggcacctttctgctggtgacccacggcaacccaacgacgctgtcgatttcgccggcggcgctgttctgggggatcgcctcggcgtttgccgccgccttttataccacctatccttcaacgctgattgcccgctacgggacgctgcccatcgtcggctggagcatgctgttcggcggcgcgatgctattgccgttttacggcggccagggcaccgattttgtggttaacggcagcctgctgttagcttttttctacctggtggtgatcggtacttcgctgaccttcagcctctatctcaacggcgcgcagaagattggcggcgcaaaggccgggatcctcagctgcgccgaaccgctgagcagcgccctgctgtcgctcctgctgctggggatcaccttcacgctgccggactggctgggcactctgctgatcctcgcgtcggtggtgctgatcgccatcgactcgcggcggcgggtgagagccgcctgagcaggcgataaaaattgcattttcaataagttaaactgaccactatttgcgtgttttcccgcctgcgcatatagttgacggaagcgattacggaaggagaagcctgatgaaagcatgttggatggtatgcctggtcaccgccctgagcgccacgtcggcgtgggccgaatcaccgctgcaaagcctgcagttcgagcagcaaaaacagcaggtgctcaaagcggtgaaggaaaaatgcgcgccagcaagccacctcagcgacaacgattttgccaataaagtgctggcgaccgacggtaacaagaacgcggtccgcgaagcaacgctggcgaaggagcgcaataaccagaaaagctaccaggccgcaatcgacaaaatcgtctgtccggccaaatagcggttatttcagcctcgcgaccagcgttttccagtcaaacggcgtcagctgcctgtagctcaggctacgggcggccatctgctccggcagctggcgctggcttttcgcgatcgcctcgctcattatcccggcgctccccacgtcacgcagggttttcaccacctcttccatctcttcgctgcgccgaatgccatgttccgccacccggctgatcagatagtcggggaacgcgcctgtccagcccagagagggaaaactatgatgcaaggagctaagcacctcctcctcaacgccgtattcacgagccgcgaacaggcattctgtggtaagcgcttcaagacctttgatcatcacgctacggcacatttttatcgccgacacctggcccaccgtactggcgccatagcgggcattcagccccagcccccgcagacgcggcgcgatcgcctccgcctgcggcccgccgatcaataacggtgtctgcaatcgggccggcggtaccggcgccatcaccgcgacatcgatgtaggcgcccggcagaaaatgttcagccgcctgccgtttcgtctccggcgccacggagttgagatcgaggaaatattgtcccggctgcagcagcgcggccgcctgctgcgccacctttagcgcctcaccggcggtcacagtagaaaaaaccagcgtggccccctccagcgcctgcgccagcgaatttcccacctgaacgcgcgaatcacgggcttttttgcccatcgcctctcgctccgggccattgagcttgcaatcccaaatggtcaccgcatgctcacgggccagatccgccgccagaatgccacccgcctcgccaaaaccaataaacgcgattgtcatcatcactcctcacgcggccagacgcgggccggaataaaaacctcgccagcaaacagcagtcgcgccgtgcgtaacaggccgcagccagccagggcgccgtcagcatcaagctgaagcgtcacgctaaattcgcctgtcggatgctcgacgctgagcagcggcgtatcgcctggcgctacctgcgccaggccctgcgcgacagagccggggagcagacaagcgctggccacgctcaccgcgccaaatacgccgatcgacgcgtggcagcggtgggggataaaggtgcggctgctgatggcgccgccgtgtcgcggctcggcgatcagggtcatcttgggcaccgtgcgctggctgacgtcgccaagctgcatcagcggcccggcctgcaggcgaatcgactccaggcgacgtttaagcgcgtcgtcattatccagctgttcgcgcgtctcatagccggtgcaaccgaggtcgcacgcgcgcagcaggatcaccggcattccgttatcgatgcaggtcacctcgacgccgtcaaaacggtcacgaacccggccggtcggcagcagcgccccgcagctggagccggcgacatcaagaaaatggagcaggatcgggctggcgctgcccggcacgccatcgatacggctctcgccgacgtagttgaccccgtcggcgtcacaggggatctctgccaccgccagttgccccgtgttctccataaaaatacgcacccgagtgagcggcgcatcgtggcgaaccagaccgcgctcgatggcgaaagggccaacggcggcaagaatattgccgcagttttggccataatccacggtagccgccgccacgttcacctgggcaaatagatagtccacatcggcgtcaggtcgtgcggagcggcggataatcgccactttgctggtcagcggatcggcgccgccgatcccgtcaatttgccggggatcaggcgagcccatcaccgccagcagcaccgcatcacgtcgcaccggatcggcaggcagatcgtcggccagaaaacaggccgctttagaggtgccgccgcgcatccatagacaggggattccgcgttgcgccatttattcctccacctcgtctgcgcggtcgtaataccgcaggcccttttccgccagacgcggacgcatagcgtaaatatccagccccaactcgccattgcgcatccgctcacgtttcgcaagctcattgctcatgcgggcttccgctttatggagcacatcacggacccgggcgtgaggcagcaccacgacgccatcgtcgtcggccactacgacatcgcccggctgtacaagctgacctgcgcatatcaccgggacgttaaccgaaccgaggctctctttcaccgtcccctgggcataaacctgacgggaccagacggcgaatcccatttcccgcaacgtttgcgaatcacgaatgccgatatcgcccaccagcccgaccacgccgcgcgattggagagacgtcgccagtagatcgccgaagaagccatcgccgcacggcgaggtcggggccaccaccagaatatcgccggcgcggcactgctcgaccgccacatgaaacatccagttgtcgccaggcgtcaccagcacggttaccgcgttgcccgcccggctgacgccctgctgaatcggacggattgccggccccatcagcccctgacgatcccaggcttcatggagcgtcgccaccccggccgcctcacagcggcgcaaaaccgcctcgtcatggcgcggcaggtggcggatcacaaggccttttttatttaacaggttcatgccaggttctccgttacgcgggggaagatgctctggaaggcttcgccgtgaacgatatcgcgcgcggccgtgatgccgatattgcgcttggcctgcaccccgcgctgcagcgccacgcgggtgtagtattcccacagatgctcctgaccctgcatgcactgaatggcctgatactttttctcccagacagcggtgatgtccagcaacacatcgggtttccagttgcactgctccggctggtgcggttcgaaacagtaaaccgggggagcagcgacaattttctcaccggggcgatagccctctgcctgggcgataatccgcgcttcctgcgccagatgggaggccagggggtgatcgtagttatagggatcctgcagggagtgcgtcaggacaaagtggggctggatacggcgatacacatccgccagacgaaatagcgtctctttatcggcgcgcagcggatagtcgccgatatcaaagaattcgacgctggcgcccaggatcgcggcggcggcctgcgcctcttcgcgacgcacctgcttcaccgcctcctcggtcatgttgcctttacgccacagtttggcggactcgccgcgctcgccaaaggataaacagaccacatggacctgatagccctgcagggcatgcagcgctatcgcaccgcccgcgcgccagacgaaatcggccgagtgggcgctgacgacaagggcacttttttcgctaaccggatgagacatgatggcttcctctgttgtttttttcagcttgtcatgtcccgtcgtggggaggtaattcgttaacttgcgaaggctatgatttttatttatgttgtcgtctcactcactttttcaggcctgacgaacaatgctaaagagaaagcacgataaaattataaatatcatgcagctgcgctttttctgtcaggtcgcgctgcgcggtagcgtctcacgcgcggccgatgacttattccgcacgcagtcagcgataacccgggctattcgcgatcttgaagccgcgttgaacgtcacgctgttcgaacgccattacagcggcatggtgcccaccgagtatggcaagtgcatcctgccgcgcgcccggcgggcgattgacgacctgcaggccatcccggcgctgctgcagaagcaccatacccgcagcagcggcccgctggcggacgccggctggctgttcaatacccgccgcttagccatttttattcagctctatcacgtcaaccatacccaaaccgtcgcgcaacagttggggatcactcagccggcggtcagtgccgcgctgaaggtcctggaaaaaggagcggattcggcgctatttcgccggacgccagagggggtgcgtcccacgcctgccgcggagctactctatcccccggtgagcagagcgctcaacgagctggaaaacatctggagcgatctcgctgcccgtcgcggggtgctggagggcaccgtgcgcattggcgccctgccgctgagccggacccggctactgccctccgccatcgccgcctttctggcccagcacccgggcatcaccctcatgaccaatgaaagcccgtatgagtcgctggtcgccgatatgcgggcaggtaatatcgattttattatcggcgccctgcgccaggatgaagatctcccggacctctgtagcgaagcgttattcgaagaggatatgttgattttactgcgtaataaccacccgctgcttcgccatccggacccacgcagccagctggcgacagcgcaatgggtgctgccgcgcgccaacgcgccggcgcgcaatttgctggataaggcgtttgtcaccctggggctgccgctgccccagccgacggtggagaccggggatgcggcgatggtgcgaggattgctgcagggctccgacatgctggcggcggtctccgccagccagatgcgttttgaaactgacaatgggctgcttagcgtgttgccggttcccctgcccgataccacccggcgtatcgggctgacgtttcgcgccggcagcctgccctccccggcgacgcaggcgctgttgcgttttatttatcagcaggttcaggacggggccgtttaacgtttacccgccaccgaataggttacctgctggttgcgcgtttgctgaaacgcctccagcgtctgcccgcgcatcgcggcgtaaatatgcaggttggatacgccgaccaccgcgcccattttctccagcaggaagaagctggcgccatactgaattaatccccgccagtcgcgcgcgttgagcaactgctgttcctcctcactcagtccggcttcggcataaagcgactgaggcgactgcagaaaacgttcacgccaggcaggctcaatcagccgatgcaggaaacggttaagccgcaagccattcaggctgcgctcgtgggtaaaaggataggttcccggcagtttctccaccccggccagctgctgcgccatatgctggcgatggcgcgtcagggtatcgacggggggcaggcgcgcattgttctcaaggatcagcgtggcgataccggtcatcgagggcaggtaatagtcgcgccaggtttcggtgacattggctgatagcgcgccgcgcatcaccagccacatgattacttcggacccctccatcccccccagctcggcatattcgccaagggtcatttcggtaagcttttccgggtcattaaccagcatatcaacaaactgggcatcccagtcgggattattaaatccgcagcgctcgccatgaacctgatgcgagagcccgccggtcgcgacaatcgccacattgatatcttccgggaagctttcaatcgcccggcgcagcgcctggccgagtttgtaacaacggcgcgcgcttggtaccggaaattgcagcacgccgatctgtaacgggatcaccgccgtcggccacccctgcgcttcatcccagggcaacagcgccgaaagcggcgagaaaaggccgtggtcgagctttttatccataaagaacgacatatcaaactcgtcggccatcaggctggcgccaatgtgccttgagagcgccgcgttgccctggaccggcggcaggcagcgcggtccgcctccctcatcggcaacgtcatattgactatcgattcccagcgtaaaagtcgaatagtgatcgaagaaaaaggcggtcacatggtcattaaagatgtataccagcgcatccggttttttctcctccagccagcgctgcagcggttcgaagctctggaagatcggcgcccacgccggatcctgctgtttatgatgatcgaccgcgaagccgatagtcggggtatgagagacggcgataccgccgagaatgttagccatcagataactccacttatcggtgttcgaggggggatgacaaagcgtcaagttctgcctctgtgagtcgaggcttagcgtgattcatacggtgcaacaaaatacagatccccgccaggcaggccggcagcgcaagcaccaaaaagatcgacgagtgtcccggcacggccagcatcagcatcccgcccagcgtggagctgaggatagccccggtacggccgataccatgcatccagctgacgccggtagcgcggatctcggtttgataataggcgggcgaataggcctgcagaccgttctgcgcgccgttaatgcacatcccgctgataaaaatcagcaccgacagcgccgccgaaccgaaatccatcaccccctgggacaacaggcacagacagccgaggaaataggttgccgcaatcacggctttcgccgaagcgcgatccatcagcataccgacaaggatcccgcccagcgggccgccgagctggaacaagccggtcatcatcgccgcctgctgcagcgacagcccgccggagcggagaatggttggcagccagccgttcagcaggtaaatcacgaacagccccataaaataggttaaccacagcgctatcgtgccgcgggcatagccatgccggaacagctgcgccactttgctgctccgcgtgatgggcggcgcattcagctggaaaacggtttcagccgtaaactggcccccaagccggttaagcgccctggcaatctgctcgcccggtagtcggcgcgccaccatgttcatcgccgactccggcaacatcacgatcataaaggggagcaccacgagcggcagcacgccgccaaaaaccagcgccgagtgccagctgtaatgcgataacaaaccggcggcgataaagccgccgaggccggaacccacgttaaaaccgctgtacatcagggtgatcatcacccctttacgccgctccggcatatattccgccaccagcgtgacgcagttgggcattacggcgccaaggccaaggccggtgagaaaacgcatcagcgccagttgcgtcgggctttgcgccacggcgccggccaggctgaacagcgcaaacagcgccaccgaccagagtaaaattcgctttcggccgtagcggtcagaaagcggacccgctaccagggcgccaatggcgacgccgaacatggccgccccaagaatcggccccatttcggcccggctgatgccccagtcttcgatgagcgccggggcgacaaagcccatcaccgcggcgtcatacccatccagcataatgatgatgaaacagagcagcagcacgttccattgaaagcgcgagaccgggcgggtatctatccacgctttcacatcgacaacgttcgtgtgattcatagggtgacttcctcaagcaggcggtacgaatgttctggttagtgttttttgagtggaactttcgtactcaacttaaggcaggtcacgcaggctgtccggttcgaaaatccggcgtcagatatgagttttatttataatgtgagggatacgacaaaaaccagccagcaaaaaacccgcagccaacggcggcgggtcagggcaagagcagcgtttagtgcttcggaataattaaatcgccgcgcagcgggctgccgcccgggttgtccgttttctcggtcagccagttgacgatccgcgacgccatcgcgtccatggaatattcaatcgccgggatagtcgggataccgggcagctgtaacgatccggcgaggctaaacaccatgacattttgcggaacggcgcggttaaacgcctgtagctgcggcaccacgcgctgcgcctgctgttcatcgctcaccagcagcgcgttaaagttcagcgtcgtggcgttattgaccagctcctgcaccgccaccgacggcgaggtgttatccagaaacaccaggttgcgattaaacggcaaaaagtttttttccagcgcgtgcttgtagcccagcagcacctggtcggcaaagccgctgctctgcggatgaatcagcgcaatctgccgtctcccctggctaatcagatagtgacaggcggtttcggcggcgaaagcatgatcgaactgaatactgttgtcgccttcgctatcgaggcagtccaccagcaccacgtccgggcggttaatattcagaggaaaacgcgcgccgatgattagcacgttatcgcacagcccgcaggtcaactcctccagagagttcatcacgccgtggctggtgttggcgaagcgcagcagcaggtgtttctggtgctggctgagctgtttttccagggcgtagagatagctggtggtttggttgatgttgtcctgggcgcagatgacgccgatgcagccggtggactggctgagcaacgactgggctatcatgtttggccggtaattgagcgcttccgccgcctgcagcaccgcctgacgactggcttccttcacgccacgtgagccgctcaacactcgcgacaccgtggctttggaaaccccggcaagtcgtgaaacatcattgattgtcgacatcattttcccctgcgcgggcgccgcgtcccgccaaaatcctgtaaacctgaatcgcttcaattatgaccagcgcagtatatccatttcgccatttgtttggaaaccgattttccatttcagcgcaaaacatcgccaaatcgacagaataatgtgagcgaaatccaataaatccgccctataagcaggagatcttgaccactatcacagttctgctttttataaatggaaaccggtttccgtctgatatcaaatcacccacgcaataactttttacattttgaggatggtcgtcgatgtacaagattatgctgtgctgctctgccgggatgtccaccagtctgctggtcagaaagatggttgaggcggcgaatgaacgtgacctgccggtgcagattgacgcctatggcgtttccgaatttgacatgcagtttccgcagtatcaggtggtgttgcttggcccccaggtgaaatacatgttgaaaaccctgtctgacaaagcggcttccctgaacattcccgttcagcccatcgatacgatggactacggtatgcagcggggagacaacgtcctgaattatgctctgtcgctgatcccagcggcgcactgagaggtgttgaaatgagttctctgtatcagtccatgattgccgtgatcgagcaatctattactccgctggcaggacgccttgggcagcagaaatacgttatcgctatccgcgatggcttcactgccgccttgccgtttatgatcatcggctctttcatgctggtatttatctttccgccgttttcacccgataccaccaacggctttgcccgcggctggcttgatttctcccagcactaccgcgaacagctgatgctgccgtttaacctcagcatgggcgtgatgaccttctttatctcggtcggcattggcgccagcctcggtcgtcagtttcagctcgatccggtgatgtccggtctgctggcgtttatggctttcctgctggtcgccgcaccctatgccgatggcaaaatttccactcagtatctgtccggtcagggcattttcaccgcgctgatcaccgccatctactccacccgcgtttacgcgtggctgaagcaaaacaacattacgattcgtctgccgaaagaggtccccaccggcgtcgcccgttcgtttgaaatcttgatcccggtgctggtggttattgcgactctgcatccgctgaatctgtttatcgaagcgcagaccgggatgatcctgccgcaggcgatcatgcatctgctggagccgctggtttccgcctccgactcgctgccggcgattttgctctctgttctgatgtgccagattttctggttcgccggtatccacggctcgctgattgttaccggcattatgaacccgttctggatggccaacctgtcggcaaaccaggcggcgctggcggctggcacggtactgccgcacgtctacctgcagggcttctgggatcactatctgctgattggcggcgtcggttctaccctgccgctggccttcctgctgctgcgtagccgggccacccatctgcgcaccatcggcaagatgggcatcgtgccgagcttctttaatatcaacgagccgattctgttcggggcgccgatcatcatgaacccgatgatgtttatccccttcgtctgtgtaccgatggtcaacgcggtgctggcttacggcgcgacgcgtcttggctggctgagccaggtggtgtcgctgacgccgtggactacgccggccccaattggcgcgtcgtgggcggctaactggaccctgagcccggtggtgatgtgtctcatctgcatggtgatgtcggcggtcatttatctgccgttcctgcgcgcttatgaacgttccttaatgaaaaccgaagttgagaaagccaaaaatagcgttccggtagcagaaaccgttagctaatccctctccttccggagagataataagatgatagcgtaataatgcagaaaatggactttcactgcattattaaataataaatacctcaggaatacacatgattgaattagaagatgcggtaatggaaattatcgttaatgcgggacagtcacgctcattatgttttgaagcgctgcatgcggcccgaatcggaaatatcgacgaagcgcgcttactcttaaacgaggccgacggctacgcccgccgggcgcatcagatgcaaacccagctcatcgggcaggatgccggtgaagcgcgtcagcccatgacgctgattatggtacatgcccaggatcatttgatgaattcgctgctggcccgcgagttctcagaagaattaatccatctgtaccagcgttaattaatatggaataacgttagcgagaatattattctccggcgtcgctgtaccctaaaaaacaaatcagcttattttggctatttattctagccagaatgggatggttattatctgaaatatattaattattaaagcgagataaccatgaatactgtaaaaaaactgcctttagccatggcggtggtcgccgcgctgtgcccaatttctgtcatggcgcaagaatttacgcaggaacagatcgacgccatcgtcgccaaagccgttgataaagcgctggccgaccgccaggcaaaaatcgacgccgcggccaacaaaaaggtcgacgtgattactaacccggaaaccaccgccgcctcgccggatatggccattccgttcggcctcaagttcagcggctacgcccgctatggcgcccacttccagaccggcgaccagaaatatgtcggcgtcgacggctcctataacggcgcctcggcgatcggccgtctgggcaacgaaagcaacg

SEQ ID NO: 56 - DNA, 359577 bp, Unknown
  source: /note="Description of Unknown: MKP2_coc_1 Mutant Bacteria sequence"
taggcctgccgccagcgttcaatctgagccatgatcaaactcttcaatttaagtttgatgctcaaagaattaaacttcgtaatgaattacgtgttcactcttgagacttggtattcatttttcgtccgaggacgttaagaatccatgtcactttgagtgcccacacagattgtctgataaattgttaaagagcagttgcgacgcgctttagcgctctgtcgcgaggtggcgtatattacgctttcctctttcagagtcaacccgtttttcaggatttttctctgcaaccgaaccggctgtttgtgtgaagtgattcacatccgccgtgtcgatggaggcgcattatagggagctctccgggaatgacaagcggaaaaatacaattttatttcaaccgctcatcttttaaacgcaacgcttatttttgctgctttttaatcgccgccggcagctctgccaggctatttagcacccaatccgccgctttttccgcttcttcagttaggggtttaccggtgcgcaccagtactttagtcccgacatccgcagccgctgccgcctgcatatcttccagtttgtcccctaccatataagaagcagccatatcgatatgcagataatcgcgggcggaaatcagcatccccggatgcggtttacgacaatcacaggtctgacggtactcctcaaccgcaccctgcgggtgatgcgggcaatagtagataccgtcgaggtcgacgccgcggtctgccagagaccagtccatccattcggtcagcgtttcaaactgggcttcggtaaatttaccgcgggcaataccggactggttagtgaccagcaccagcgcgtagcccatctcttttagttcgcgcatcgcgtcaatgacgccatcgataaattcaaaattgtcgatttcgtggacgtagccatgatcgacattaatagtgccgtcacggtcgagaaaaattgcgggtactgactttgccaccggtttgctcctgaaaaagactagtgccgctagtatcgcatgtttccgcatgcaagaaagtgctcattataaagagtcagattgatttagacgtctggatgccttaacatccatttcattgccaggcatcgcctggatacggcagaagaaaatgccacggcaaacggctaaacgataataaataactgatgattaaactttccaatatcaccaaagtattccagcaggggaatcgcagcattcaggcgctgaataacgtcagcctgcatgtccctgccggacagatttacggcgtcatcggtgcctccggcgccggtaaaagtacgctgattcgctgcgtgaacctgctggagcgcccgaccgagggcagcgtacaggttgacggtcaggaactgactgccctgtcggagaaagagctaacccgcgctcgccgtcaaattggcatgattttccagcattttaacctgttggcctcgcggaccgttttcggcaacgtggcattacccctggagctggataacacgccgcaggctgaaatcaaacgccgtgtcacggagctgctggagcttgtcggcctgggtgataagcacgacagctacccggccaacctctccggcggccagaaacagcgcgtggcgattgcccgcgcgctggccagcaatcctaaagtattgctgtgcgatgaagccaccagcgccctggatccggccactacccgttccattctcgaactgctgaaagacattaaccgtcgcctgggcctgactatcctgttgatcacccatgaaatggacgtggttaaacgtatctgcgactgcgtggcggtcattagtaatggtcaattgatcgagcaggacaccgtgagcgaagtcttctcccatccgaagacgccgctggctcagcagtttattcagtccactctgcacctcgatattccggatgactatcaggcgcgcctgaaacctaccgccacagcggatagcgtaccgatgctgcgcatggaatttaccggccactccgtcgatgcgccgctgctctctgaaaccgcgcgtcgcttcaatgtgaataacaacattatcagcgcgcagatggattatgccggcggggtgaagttcggcatcatgctcaccgaaatgcacggtacacaggaagacactcaggcggccatcgcctggctgcaggaacatcatgtaaaagtagaggtattgggttatgtctgaggcaatgatgtggctgctgttgcgcggcgtatgggaaacgctggcaatgacttttgtctctggcttcttcggttttgtcctcggcctgccggtgggcgtgctgctgtacgttacccgtccggggcaaatcgtcgccaatgccaaactgtaccgtacgctgtcggcgctggtgaatattttccgctccatcccgttcattatcctgctggtctggatgattccgtttacccgcgtgatcgtcggtacctctatcggcctgcaggcagcgattgtgccattaacagttggcgccgcgccgtttatcgcccgcatggtggagaacgccctgctggagatccccaccggccttattgaagcctcccgcgcgatgggcgccacgccgctgcagatcgtgcgcaaagtcctgctacctgaagcattgccgggtctggtcaacgccgccaccatcacgctcatcacgctggtgggttattccgcaatgggcggcgcggtgggcgccggtggcctaggtcagattggttatcagtatggctatattggatataacgccaccgtgatgaataccgtactggtattgctggttgttctggtttatttaattcaattctctggcgatcgcatcgtccgggctgtgactcacaaataacgttattggcagacaacactcattcttacaggaaggaaataacatggcctttaatttcaaaacttttgcggcagttggcgcgttaatcggttctctggcgctggtgggttgcggtcaggatgaaaaagatccgaatcatattaaagtcggcgttatcgtcggggcggaacagcaggtcgctgaagttgcgcagaaagtagcaaaagagaagtatggccttgacgtagaactggtgaccttcaacgattacgttctgccgaacgaagcgctgagcaaaggcgatatcgacgtgaacgccttccagcataaaccgtatctcgatcagcagattaaagaccgcggctataagctggtggctgtcggtaacaccttcgtctacccgatcgcgggttattcgaagaaaatcaaatcgctggacgaactgcagccgggctcacagatcgccgtccctaacgatccgactaacctcggtcgttccctgctgctgctgcagcaggtaggtctgattaaactgaaagacggcgtgggcctgctgccgacctcgctggacatcgtcgagaacccgaaaaacctgaagattgttgaactggaggcgccgcagctgccgcgttccctggacgatgcgcagattgcgctggccgttatcaacaccacttacgccagccagattggcctgaccccggcgaaagacggcatctttgttgaaggtaaagagtctccttacgtgaacctgattgtggcgcgtgaagacaataaagatgctgagaatgtgaaaaaattcgttcaggcttaccagagcgatgaagtttacgaagcagcgaacaagatctttaacggcggtgccgtgaaaggctggtaatcttttctcaccgtaatatcattcaggacgggcttcacgcccgtcttgtcatttatgcaagcacctgattcaataacgccctgttttttattcattgaggaaatactatgcgtgctttaccgatctgtttgttagcactcatgttaagcggttgttccatgctaagcagatctcccgttgagcctgctcaaagcactgcaaccccgccggttaaatctgagccgagcaaaccgcgcgccacccgcccggccccagtacgtatttacaccgatgcgtcagagctggttggtaaaccgttccgcgatctgggtgaagtatctggcgagtcctgccaggcttcgaatcaggattctccgccgaatatccccaccgcgcgcaagcgcctgcaaattaatgccgcgcgtatgaaagccaatgccgtcctgcttcaccgctgcgaagtgaccagcggtacgccaggctgctaccgtcaggccgtttgcctgggttcagcgcttaacgtctcggcgcaatgagcgcatttcagttcgcgcagataggcgtcatccgttcgccgtataaagagaagtttgccgttcctcgccagccaggcctggtgaaacacggcggcggagaactccatctggtcgcgccctataaccaggccgacgccgtgcgtggcctggagagcttcagccatctgtggatcctgtttgtgtttcatcagacaatggaaggcggttggcgtccgacggtgcgacctccccgactgggcggcaatgcgcggatgggcgtcttcgccacccgttcaacgtttcgccctaatcccatcggcatgtcgctcgttgagctcaagggcattcgctgtcagaaagatcaggtaatactggaactcggcagcctcgatctcgtcgacgggacgccggtggttgatatcaaaccgtatcttcctttcgccgaagccctgccggacgccagcgccagctatgcacagcaggcgccgctggcgggtatgaacgtcagctttacgccggaaatagacgcacagttactcacgctggaaaaacgctacccacatatcaaagcgtttatccgcgaggtgctggcgcaggatccgcgtccggcctaccgaaaagaggaacaagcgggaaaaacatatgccgtctggctgctggatttcaacgtccgctggcgggtgactgcctccggttttgaagtctttgccctcgaagcgcgctaattttattttcctctcttttggcatctttgccacactggtaaactaaaccactttttttgtttcaggctgggcaaccagcctgttccgctcgtttaactggaaccgttacaacatgcgtactagccaatatctgctctccactctgaaggagacacctgccgacgccgaggtaatcagccatcagctgatgctgcgcgccgggatgatccgcaagctggcctccgggttatacacctggctgccgaccggcgtgcgcgtcctgaaaaaagtcgaaaacatcgtgcgtgaagaaatgaacaacgccggtgcgatcgaggtgttaatgccggtcgttcagccatctgaactgtggcaggagagcgggcgctgggagcagtacggcccggaactgttgcgcattgccgatcgcggcgatcgtccgttcgtcctcggcccaacccacgaagaggtcattaccgatctgatccgcaacgagctgaactcctataaacagctgccgctgaacttctatcagatccagaccaaattccgcgacgaagtacgcccgcgtttcggggtgatgcgctcccgtgaattcctgatgaaagatgcctactctttccatacttctcaggaatcgctgcaggaaacctacgacgcgatgtatgccgcttacagcaaaatcttcagccgtatggggctggatttccgcgcggtacaggctgacaccggttctatcggcggcagcgcctctcatgaattccaggtgctggcgcagagcggcgaagacgatgtgatcttctccgacagctccgactacgcggcaaacatcgagtttgcggaagccgttgcgccgaaagagccgcgcgcagccgccacccaggagatgaccctggtcgatacgccgaacgccaaaaccatcgccgagctggtggagcagttcaacctgccgatcgaaaaaaccgtgaaaactctgctggtgaaagcggttgaagatagcgcttccccgctggttgccctgctggtgcgcggcgatcacgagctgaacgaagtgaaagcggaaaaactgccgcaggtcgccagcccgctgaccttcgccaccgaagaagagatccgcgccctggtgaacgccggtcctggctccctgggcccggtgaacatgccggttccggtgattatcgaccgtactgtagcggtgatgagcgatttcgccgctggcgccaacatcgatggcaaacactacttcggcatcaactgggaccgcgatgtcgcgacgccggaagtggccgacatccgtaacgtcgtcgccggcgacccgagcccggacggtaaaggtaccctgcttattaagcgcggtatcgaagtgggtcatatcttccagctggggacgaagtactccgaggcgatgaaagccgcggtccagggcgaagatgggcgtaaccagatcctgaccatgggctgctatggtatcggggtgactcgcgtggtagcggcggcgattgagcagaactttgacgatcgcggtatcgtctggccggatgcgattgcgccgttccaggtggcgatcctgccgatgaacatgcacaagtcttaccgtgtgcaggagctggcggagaaactgtacgccgagctgagcgcccagggtattgaagtgctgatggacgatcgtaaagagcgtccgggcgtgatgttcgccgatatggagctgatcggtatcccgcacaccatcgtgctgggcgatcgtaacctcgacaacgatgatatcgaatacaagtatcgtcgcaacggtgagaagcagctgattaagaccggggatattgtggaatatctggttaaagcgataaaaggctaacacccacctcagggccctgaacggatgtcagggccttttttttacaaggacagtaccaatgactgcacatctcctccgcagcggactgcttacttttgccctgctcctacttaccgcctgtaccctggacgtcggccgcagctcgccttccacatctgctgccgatgaccattcatcatcctgggctgttaccctccagcgtcaaagctcgattgccggcagcggactgcgcgaaatcgccgaaagcgacctgcgctccggcgacctgctgttctcctccagcctgggcgtcacatcgcttgggatccgcgccttcagcgcctcttccgtaagccacgtcgcgctgtatgttggcgaaggtcaggtagcggaagccaccggcgccggcgtacaagtgattacccttcagcaggcgctggcgcacagcgataaactctttgctctcagggtgcctgacctgacgccggaccaggcgacggcgatgaaaagttttgcctggcaggtcaaagacagcgggtataactatcgcggcattattcagtttatcccttatatggtcaccaaaccgctctgctcgctcaaccccttctcacgagactttcgccagcagtgcgtcagcggcctggctaaagcgcagctgggcgatgcggcaagcggcgacaagaaagcgtggttttgctcggagtttgtcagcgaggcctttgtccgagccgggcatccgctgacgctcgcgcaggcggcgtggatcagtccttccgatctgctgcacatgcgggaaggagacgtcgccacgtttaaacccgaaacgcagctccagtatgtcgggcatttgaaactgggagtttatcttcaggccggtaagctggtggggctgaacaaaccgaaggacggtgcggagtaaagaaacgattgacgcttttccgccagccagatccacgctcactcttgatgtgacagggctaataacaggaggaagtaggtggtactgcgcgggatcatcccctgcccgttacccggacaggggcctgacaatcaatggctgcagtctttaccgggaataaatttgccggcttgatccgtcatcagcgttttcatcatctcgccggtatccgggttcgcttcgagagtaaagtgcccttctaccaccagcagtaccgggcgagtatcggtcccgcgcgcggcggcataatcccgttcaagctgggcattgttcgccaccgcgacgcgtttaccggtcgcgcaatcggtaaaggttgccgcatcggccatatagaaatacatgccgcgcatcgccatcggcgtcgtcggcaggctggccttcactggctccagggtatagttgagaggagactgaatggggcttccgttgcggtcgagcatctccagcttgtcgcctttcgcgcgaaagtaagatttctcgcccttgctgttggtcagcaccagcttatccgcggtacgtgcccaggtgccgtacgaggcaaaggatgacggctcacgacgggcgccctggtagtgctcattcatcacccaggtcccgtctttttccaggaacagcgaggtgtcgataccttcgcaatccgcgcaaggcagcacgcctcgccagctttgctgcatcggcttgagctcttccatcgccgctggctggaccgtgtcagtctcggcgcgatggttacaaccaaacagcgcgaacagcgaacaggccgctatcacggagaatacgattttcttcactttgctttccttatcatccatttcacccgttcgccgacgccttcactggcgaactttcccacgcagcgccttgactgaggacttctgtgccttggaagcaaggcgtcgctctttcgatgcccgagtcggtcgcgtctcccggcgacttttttgcactgcggttaattctttaataagggccaccaaccgggcgatcgccgcttcacggttcatctcctggctgcggtattcctgagccttaatgataaccacaccgtcagcagaaattaagtggtggctggcggcgagcaggcgctctttgtaaaactccggcaggcttgaagctttaatatcaaagcgcagatggatcgccgtcgacgctttgttcacatgctgcccccctgctccctgggcgcgaatgcctgacaagacgatctcgtcgtcggcgagggctacgctgcggctaatagtaatcatgccgacgcttgccaggcggtaagctgaatttccagattattccgagcgtcggataaccagatactgccctcctgcagagtggcctgcagcgtcatggtacggtcggcaaaggcgctaagcagtgccagttgcgcatcatcaagataccagatggtcagcttcgggtacgccgcaagcttgctctgattctgctgccaccagatttcagctgcccggctattataagcaaacagcgccaccgcctgcgcccgtgagcaggctttcttaatccgccgctcatccggcagacccagttcgatccacagatcgaccccgagatgatcgttaagcagccacagctccggctcgtcatccgacgatagaccgcgggtaaactgtagccgttcatcggcatatttgatccatgccagcaggcgcagcatcatgcgctcctgggtttctgacggatgctgagccagcgtcaggttagcatccagaaactggttgcgatccagatcggctacatttaccgcagctttatatattgtcgctttcagcgccatgaataaactcctgaaaagaatggcgtacattgtagcgaaactggcggcaaaaggctgtcgtcaatcgcagcaacctgtttcatcctgctgaaattgcttaaatgactatgatatagttcccttgctaaacagagtttatcttcgtaggcttaaacttgcatcccacggttgagtcagaacgctgacaggagggcatgtggaccactattgtgagttaatacgcaagcggtatgcggaaatagccagcggagacttagggtatatcccggatgcgctgggttgcgtgttgaaagtattgaatgagattgcggcggatgaggccctttcggagtcagtcagggaaaaggccgcttatgcggcagcaaacttactggtgagcgattatgtcaatgaatgatacttatcaacccattaactgcgatgattacgacaacctggagctggcctgccagcatcacctggtgctgacgctggcgctgaaggatggcgaacagctgcaggcaaaggccagcgatcttatctcgcgaaaaaatatcgagtatctggtggtcgaactcgccggcaacgtccgcgagctgcgcctggataaaatcgccagcttcagtcacccggaaatcggcaccgtggtggtgagcgaatcctgaatcaaaaacgggcttaatcgcccgttttcctccacatcagcctgaccccttccccgtccttcacttcaccttctgtggtcacaaacagatcgtccgctgcggcaatcggcgtttcgccgtaaaacagcagcggcgtggtgtctcgtcgccacggagcaacgcccagctcctgccagagcttcttaagcttgcgtccgccatggcgcccgacaatatgcaggtggccgctggcgcgaaagcggacggtgaccggctcatccgccgacggcgggcgcagcctgccgccgggccgcagcgtcagctcgccgagaccgtccgccagccgcagcggctggcgccagtcgggccagcgctgaacgctgtccgtctgaccgggaagatacttcacccagtacaaacgctgttgaaaacggcggacggtaaattcccccagccgcagacaggggctggcatcttcccgcgccagcgccacctcgtgccagaggcgctcaggcacctcgcgggcgggcatcggcgcctgctgcccggcgagccagcgacgcagcagcgccgctcggcgcggcggactcatcgtcgccagcggcgcgatagccagcgagccatcttcggccaccagcgacgccagctccgccgccaacatctcgtccagcagttgttcctgctcggcgcacaggctggcgctgcgggcgacggcctcgctaaagtgcggccaacgctcgcgcagcaccgggatcacccgcaggcgcaggaaattgcggtcataggtatcatcctgattactctcatcttcgatccacgacagctgatgggcgagcgcccactggcgtagtgattcgcgggtttcattgaggagaggacgcagcagtcgactgccggcaaaggcagaggatggcgccatcgccgacaggccggtaggaccgctgccgcgttttaacgccagcagcagggtttcgcactgatcgtcctggtgctgggcggtcactaacacctcgccggcattgagcgtatcctgaaaggcctgatagcgcgccgcacgagcgtgggcctcgacgcccagccctccccgggctaacgtcacgtgatgcaccaccagcggcacctgccactgctggcaaatctgccgacaatgcgccacccagtcgtctgcgtgggcgctaaggccgtggtgaacatgcaccgcccgcagcgtcagcgagggatcctgttcccgcagcagcaccagctgatgcagaagaaccgtcgagtccagaccgccgctgaaggccaccagcagctggcgatggggatgaagcgtatgcgcaatatcagccgtcatatccacgaacataccgagaagtgatggcccggcacgttaccgggccagggtcgcgctggcaagatttactgctgatatatttccagcggcaggtcgtccggatcgctaaagaaggtaaagcgtttaccggtaaagggatcgacacgaatcgcttcgcactccacgccatgcgaggtgagatgggctaccgcggcgtcgatgtcatccacgctaaaggccagatgacgcagcccgcaggcttccggacgactggggcgggctggcggaaacgggaacgagaacaactcaatcacatactcgccgttgagcgccagatcgcctttccaggaatcgcgctcggcgcgataaaactcactttgcagcgtaaaccccagaatatcgcaatagaacgctttactgcgggcgtagtcggtcgcaatgatggcaatatggtgaacccgtttcaaacccagcatggttaaactccttctgttaagccagccacgttactcgtgcgcgccgttaacgcgcaagcctttcgtcattttttaagactcgtacccgatacacaccgtcctcatcgcgcttggcgccgtgaatatcggtctcaaagcccgggtaatgacgaccgatagagcaaagcatcagcagaaaatcgagcaccgcccggctttcctcggtgatcatctctcccggcatcagcagcggaacccccggcggataagggaggatcatgttggccgaaatccgccccaccaggttctccagttcaatagtttccacctcccccttgatctggcgctgccaggcgtgatgcggcgtcattttcatttccggcaggacgtcaaaggcgctgagcatcagctgcggcagctgatgctgacggatcaagcggtggatcccctgcgccagatcctggatccgcatgttgcggtagaagtcgggatcttcggcgtacagatccggcagcatatttttcacccgcagattgagatcgtaggcgcgtttaaactcggtcaggccgcgcagcagccccatcgcccgggttttatcgatgccgatactgaacaggaacagcagattgtaggggcctgttttctctaccaccacgccccgctcgtcgaggaacttcgccaccagcgccgccgggatcccctcttcatccatattcccctgctcgtccatgcccggcgtcagaatggtgaccttcaccggatcgagatacatatgatccgcatcggcatctttgaaaccgtgccagtcctcgcccggcgctaccggccagcactcggctttatccacggcttccggctgccagatatcaaagaaccagccgtccgactcctcacgcagtcgctgcacctctttgcggaagtccagcgcccgctcaatggagcgctggatcagacgtttaccggagttgccgcgcagcatcgccgccgcggtctcaatcgacgcgacgatggggtagctcggcgacgtagaggtatgcatcataaaggcttcgttaaaggtctcttcatcatagttgcctttaatgtggatcagcgaggcctgcgacagcgcggccagcatcttatgcgtcgactgcgtctcgaagatgactttcccggggatccgctccccgctcataccgcttttcccctgatatatcggatggaaatgggtatagggcacccaggcggaatcgaaatggatcgacgggacatcgagcgtctccttaagccaggtggtgttatagagcagaccatcgtaggtggagttggtgatcaccgcatgcacgggccactgcgccccgcccgtgtcgcgcactttctgctgaatgctgtcgcgggtaaattcgcgccgggggataccgccgaggatccccagcgcgttgcgggtcggcttcagccacaggggaaccacatcgctcatcatcagcaggtgggccagcgatttgtgacagttacggtcaatcagcagggtgctgccggcgggcgccgagtacatgccgacaattttattggacgtcgaggtgccgttggtcaccatatagctttgctcggcgccaaaggcgcgcgcgatatactcctccgcctccaggtgcgggccggtatgatccagcagggagcccagctcggtgaccgaaatcgagacatccgccttcagcgtattcccgccaaaaaaatcatagaacaggcagcccaccgggcttttctgataggcgctgccgcccatatggcccggcgtgcagaaggtatattttccctcctggacatagttgaacagcgcgcgggtaaaaggcggggtgatattctccaggtactcgcgggtgtactgcccaatgcgggtggcgatctcttcggagagtcccagcgcatattcgaagaaccacagcgtcatgcgcaaatcctgactgctgacatccatcgtcgagtgggcgttaataaaggcgtacagaggaaggtattcattgagctgattgatatcgctgcacagatcgacgctgtattcatcccagtcgaagatcaccccgcagatgcgcgggttgtgctcgataaactgcagcaggtcggcgctgttttgcggccagatggtctggaagccctggcgctgcagcgccgcttccagttctttgatcggctcgtctttgtggtagacgccgtgaggccccatgatggcgatgatattcacgctttcctcctggtattaacctaagtcaagcatcatagcaatcccccgggcgcatcgcacataaaaaaagggccggaaaatccggcccttagtgttaagtcctgacgaaaaagttaagcgtaaccgtagctcatcagacgctgataacggcggttcagcagctcttcttcgctgagcagatcgaggtctgccaggtctgccagcagctgcgccttcaggcttgccgccatcgcttccgggttgcggtgagcgccgcccagcggttccggaacgatagaatcgatcagcttcagctctttcagacgcggggcgataatgcccattgcttccgcagccagcggcgctttatccgcgctcttccacagaatggaggcgcagccttccggcgaaatgaccgaataggtgctgtactggagcatgttgaccttgtcgcccacgccgatcgccagcgcgccgccggagccgccttcaccgattacggtgcagataaccggcacgctcagacgcgacatctcacgcaggttgcgggcgatcgcttccgactggccacgctcttccgcgccgacgcccgggtaggcgcccggggtgtcgataaaggtgatgatcggcattttaaaccgctcagccatctccatcaggcgtagcgctttgcggtagccttccggcgccggcatcccaaagttgcggcgaattttctctttggtttcacgacctttctggtggccgatgatcatcaccggacgaccgtcaagacgcgcgataccgccgacaatcgctttatcgtcagcgaaggcgcggtcaccggccagttcgtcaaattcgtcgaacgccaggcggacataatccagggtgtaaggacggcgcgggtggcgcgccagttgcgcaacctgccatgcaccgagatcggcgaagattttgcgcgtcagctctacgcttttctcacgcagacgatgcacttcttcgtcgatgttaatatccagtttctcatcctgacggcttaccgcagtcagggaatcgattttcgcttccagctctgcaatcggctgttcaaaatctaggaaattcagactcatagtattcctgtattagtcaaactccagttccacctgctccgagccgataaggccccgcagatcgttaagtaaacgatcgctcggagagacgcgccatgttgcgccgaaacgcaaccgcgcgcgtgcatccgccctctgatagtagaggtgcactggaatggttcccgaacggtggggttccagagactgacggagtcggtttaaaagctggtcatcaatttgcctgtccgtcagcgagatagcaagcccgcgagcatatttttcccgggcttcgtcaatgtccatgacttcacgggcggtcattttaagccccccgctaaagtcatcaaagctgacctgtccgctgacgataagtatgcggtctttttctagcaactgctgatatttatccagcgcgtcggtgaataacatcacttccagccgcccggaacggtcatccagggtacagatgccgatacgattgccgcgcttggtgaccattacccgcgccgcaatcaccagccccgccgccgtggtgactttcccacgttcggtcggatgcatgtctttgagcctcacgccgccgacgtagcgctcaatctccttcagatactggttaatcgggtgtccggtgaggtatagccccagggtctccctttcaccatccagcaccacctgctcaggccatggctggcagctggcgtaggattgctcaatttgctcgggctcttccgccagcacgccgaacatatcagcctggccgatggcctcggctttcgcgtgctggtcggcggctttcaacgcatcgcccagcgaattcatcagcgccgcgcgatgtgggccgagacgatcgaacgccccggacataatcagcttttccagcacccgacggttgagctttttaatatcggttcgcgcgcagaggtcgaacagctcgcggaaatagccgccattgttgcgcgcctcaataatcgcttcgatcggtccttcgccgacgcccttgatggcgccaatgccgtagacgatctcgccatcgtcgttgacgtggaaatggtacaggccggagttaatatccgggggcaggatttttagccccattcgccagcactcatccaccaggccaaccactttctcggtgttgtccatatcggcggtcatcaccgccgccataaactcggccgggtagtgcgccttaagccacagcgtctggtaggagaccaacgcgtaggcggcggagtgcgatttgttaaatccgtaaccggcgaatttctccaccaggtcgaagattttcatcgccagttcgccgtcaatgccgtttttcttcgccccatcctcaaagatagaacgctgcttggccatctcctccggctttttcttacccatcgcacgacgcagcatgtccgcgccgccgagggtgtatccggacagcacctgggcaatctgcatgacctgttcctgatacaggatgatgccgtaggttggctccagcaccggtttcaggctttcatgctgccactgcacgtccggataagagatctcctcgcggccatgcttacggtcgataaagttatctaccatccccgactgcagcgggcccgggcggaacagagccaccagcgcgatcatatcttcgaagcagtccggctgcaggcgtttaatcagatctttcatgccgcgcgattcaagctggaagaccgcggtggtttccgagcgctgcagcatgtcgaagcttttcttgtcatccagcgggatggcggcgatatccagcggcccttcgccgttcttctcacggcgcttgttgatcatctccagcgcccagttaatgatagtgagcgtacgcagaccgaggaagtcgaatttcaccagcccggcgtattccacgtcgttcttatcaaactgggtaaccggatgcagcccctgctcatcgcaatacagtggcgcgaaatcggtgattttggttggagcgataactaccccaccggcatgtttaccggcgtttcgcgtcaccccttccagcttacgcgccatgtcgatcagcgccttcacttcctcgtccgcctcgtagatctccggcagctgcggctcggcctcgaaggctttcgccagcgtcatgcccggatcgggcggcaccagcttggagatacgatcgacaaatccgtacgggtgacccagcacgcgaccgacatcgcggatgaccgctttcgccgccatggtaccgaaggtgatgatctgcgataccgcgtcgcggccgtacatatccgccacgtgctcaataacctggtcgcgtttctccatgcagaagtcgacgtcgaagtcgggcatcgagacacgttccgggttaaggaaacgttcgaacagcaggtcgaactccagcgggtcaagatcggtgatcttcagcgcgtaggccaccagcgaaccggcgccggaaccacgtcccgggccaaccggcacgccgttatccttcgaccactggataaactccatcacaatcaggaagtagcccgggaaccccatctggttgataacctggagctcaatatccagacgctggtcatactccgggcgcttttcagcacggacggcaggatccgggaagaggaattccagccgctcttccagaccctctttcgatttcatgaccaggaaatcttccgtggtcatatcgccggtcgggaactgcggcaggaaatattcgccaagccgcacggtgacgttgcagcgcttggcaatttcaacgctgttcgccagcgcttccggaatatcggcgaacagctcgcacatctcttcctcgctgcgcatatattgctgcggcgagtagttgcgcggccgtttcgggtcgtcgagcgtaaagccgtcgtggatcgcgacgcggatttcatgggcgtcgaaatcgctggtgtcgagaaagcggacatcgttggtcgccaccaccggcaggccgcgcgcttccgccagcgccacggcggcgtggagataggcctcttcatcctgtcgaccggtacggatcagctccagaaaatagcggtccgggaaatgctcttcgtagaaggcgacgcactgttcaaccagcggcatattgccgcggatcaggctgacgccgacgtcacctttccggccgccggagagcagaatcagcccttcctgatgttccaccagccagtcgcgatcgatccacggccccagggcgccgtagccgcgctgataggcgcgggaaatcaacagggtcaggttctggtagccggtgttgttcgccgccagcacggtcagctcggtaaattcgtcgccgagcaggtcgcactgcacgtgaaagtcggcgccgacgatcggcttaatccccgcgccgtgtcccgtcccgtagaacttcaccagtccgcagaggttggtgaaatcggtgatcgccagcgctggcatgccaagcgaggccgccttcttcaccagcggcccggtctttgccagcccatcgatcatggaatagtcgctgtgcacccgcaggtgtacgaaacgtggttcagccatctttagatcccggtgacttagttggacgccaggcccagggcacgcttcaccgggccaaaactgcgccggtgatgctctgttgcgccgtgttcctgcagcttctgcaggtgaacagcggtgggatagcctttatgctgggcaaatccgtagtggggaaatgcgaggtccagcgtggccatttcggcgtcacgagtgacttttgccagaatagacgctgcgctgatttctgccacccggctgtcgcctttcaccaccgcctgggagggcatcggtagcgacggacagcggttgccatcgatccggacaaactcaggaacaatgctcaggccggcgacggcgcgctgcatcgccagcatagtggcatgcagaatattcagctcgtcgatttcgtgcggctcggcgcgccccaggctccagcacagcgctttctctttaatctcatcgaacagcgccagacgacgcttctcgctgagttttttggaatcattcagacccacaatcggcttcgccggatcgaggatcaccgccgcggtcaccaccgcgccaaccagggggccacgcccgacctcatcgacgccggcaaccagatgggtatgcggatagacgaactccatcattgttttgctaactccagtacggcgtccgccgcctgctcatcggcgttgcagcggatctgctgatgcagggcgcggaacgtctcatgcatctcatggctggttttgccatcggccagcagcggctgcagagcggctgccagcgcctggggctcgcactcatcctgcagcagctctttaaccagttcgcgacccgccagcaggttcggtaacgagacgtagtcggtttttaccaaccgcttcgccagccagaaggtgaacggcttcatccggtagccaaccaccatcgggcatttcgccagcatacactccagcgctgccgtcccggaggccagcagcgcggcgtcgctggcgatcatcgcatcgcgcgcctgaccgtccagcatatgcacgatcatatccggcgccgtcgcagctttaatacgctcaaactgctcccgccgtttagcattaaccagcggcaccaccacctgcagatcgggataggtggcgcgcagaagctgcgcggttttcaggaagtcggcgctaagcatttcgacttccgcgccgcggctgccgggtagcagagcgaggcagcgcacgctgtgcgggatccctaaccggtcgcgcgcagcgcctttgtcaggatccagcggcatcgcatccgccatggtatggccaataaagcggcaggggacgttaaatttgtcataaaacgctttttcgaaaggcagaaaggccagcaccagatcggtggatctgccgattttgaaaacgcgtttttgtcgccaggcccagaccgacgggctgacgtagtgaatggttttgatgccctgctttttcagatttccttcgagggtgatattaaagtcaggggcgtcgatgccgacgaagacatcgggacgcagctcgccgaagcggcgggtcaaatcggcgcgaatatggagtaagcgacgcaggcgaccgagcacttcaacaatgcccatcaccgccagctcttccatttcataccaggcttcgcacccttccgcctgcattagcggccccgccacgccgacaaagcgcgcattcgggatgcgtgctttaagcgcgcggatgagaccagcgcctagaatatcgccggaggtttctccggcgaccagggctatcgtcaggggacgctgttcagccattaacgaatcaagccgcgggtagaacgagcgaagaaatcgacaaacggctgaacctcaggatgctgagcagccagttcggcgatttccggcttggcttcttccagcgttttgccgctgcggtacagcagtttatacgcgttgcggatcgcggtgattgcttcccggctgaagccgcggcgtttcagcccttcgatgttaacgccgaacggcgtcgcatggttgccctgggcaattacgaacggcggaacgtcctgcgccacgccggagcagccgccaaccataacgtgtgagccaatgacgcagaactgatgcaccgccgtcatgccgccgataatgacataatcatccagcgaaacatggcccgcgagcgtcgcgttattggccagaatgcagcgatcgccaagcgtacaatcatgcgccacgtgggcgttgatcatcagcaggttatcgttgcccacctttgttaatccaccgccctgtactgtgccgcgatgaatggtgacgctttcgcgaatgcggttgcgatcgccaatttccacccgggtcggttcgccagcatatttcagatcctggttaacttcgccgatggaagcgaactgatagatctcattgtcacggccgattttggtgtggccgttaacgacaacgtgagacttcagcacggtgccttcgccgatttcgacgttagcgccaacaatacaaaacggaccaatgtggacgttagcgccaatcacggcgccttcttctacaatggcggtaggatgaacaaaagcggttttatcaatcacgtatcaggcctcccggctacgcgcacacatcatcgtcgcttcgcaaaccactttaccgtcaaccagcgcaacgcctttgaaacgggtcaggccgcggcgggttttctcgaaagtgacttccataatcatctgatcgcctggtactaccgggcgtttgaagcgtgcttcatcgatacccgcgaagtagtacagctcgcctggttccagttttccgacgcttttgaacgccagaatcccggtggcttgcgccattgcttccagaatcaggacgcccggcaaaatcggcttaccagggaagtgcccctggaaaaacggctcgtttacagaaacattttttactgcgcgcagaaaacgaccttcttcaaaatccagcacacggtctaccagcaggaacgggtaacggtgaggcagaagttccagaatctcttcaatgtgcagagtatgagtgtcagtagtcaaaatactcttcctgtctaaatgtactaaaaggcaataataacacggcctgcggcaatcttttagcgaatgcaacaggccggaaatgtcatgtgaccaaatgatgaattagtcttgttgattaaccttgcgctcaatcgctttcaggcgcttgctcatctcgtcaatattcatcaccagcgcagcggttttacgccacgccttgttcggctgcagcggaataccggaggaatatacgccaggttcgctgataggacgcatcaccatccccatccccgtgacggtgaccttatcgcagatttccatatgaccgttaatcacgctggcgccgccaatcatgcagtagcggccaattttcaggctgcccgccatgataacgccgccagcgaccgcggtattgtcgccaatcaccacgttatgcgcaatctggcactggttatcaatgataaccccgttgccaatcacggtatcgtccagcgcaccacgatcaatcgtggtgcaggcgccaatctccacgcgatcgccaataatgacgcgacccaactgcgggatctttacccagttaccgcgatcgttagcgtagccgaagccatccgcgccaatcaccgtgctggactgaatcaggcaattctcgccgatctcaatctcatggtaaacggtcacattagcccacaaacgcgagccggcgcctattttcgtatttttcccaacgaagcagcctgcgccgataactacgttatcgcccagcactacgccggattcgataaccgcgttggcgccgatggcaacgttgctacccagcttcgccgacggatcgatgaccgcgctcggcgcgatatcctgagccggctgcggcgtggtatcaagaatttgagccatgcgcgcgtaggtcaggtaggggttacgcactaccagcgcggcgctatgggcaaaaggtaaatcatcctgcgtcatcacaacggcagaagcctggcaagcggccaggtgctcacggtacttagggttgaccatgaaagtgatttggcccgttttcgcgctctgcatggacgcaacgccggtgatgacgatatcgccatcaccgtgtaattctgcatccaactgctgcgcgagatcagccagtcgaattgaaggcattacttatttaacctgtttcagcacatcagcggtgatgtcttttacatcgctgctgttatatgcaacggcattcgcgtcaaccaccagatcgatgctctgatctttcgctacgctctgtacggcagtctggatacgggtaaccagtttgccacgctcttcgttggaacgacgtgcgcgatcctgttcaaacgcctgcgctttctgggagaaggtctggcgctgagccatcacgtctttttccagtttggtacgttcggcgcccggcttcatggactgcagacgctgcattttggattgcaggtcgccttccatacgctgcagttcgctagcgcggcctttgaactcgttttccagcgtgttggaaacgccagttttctgggcaacctgttggaacaggctgttcatgttcaccagggcaattttatctgccgcctgagcggaagttaccattgccaaacccagacctgcagctaataaccactttttcacaataaactccttaccatcccatgagtacccaggggtaccgttatttgcgtggcgaggcgataaacgcgttatcgcctacagtcagcgctatactgcacttgcattccgttgccgccaacaattaccaggttttaccaatgttaaactggaactgttcggctttgtctccatcgtactttttgaacggttgggcgtaggagaagaccaacggccccaacggcgacatccactgcacggcaatacccgcagacatacggatgttgctcggatcgctgtaatccggataaccagcgtacgcgctcgaatcccagtgagtatcccatacggtacccatatcccagaagacggaagtacggaccgagttcgcatatttgtcactaataaacggcgtcggggtaatcagctcaaggctggccaccgccatcgcgttaccgcccaccgcatcatcggatttacacggtgcggattcggtgctcttacattcattatcgtaactatcgtcatcatcatgacgactgcttgccgggaagtacactgccttcggaccaatggtgttcgactggaagccacgcacggtgctggaaccaccggcatagaagttctcatagaacggcatctctttgccgccaataccatcgccataaccaaagcgcgtacgacccagtactacccactgatgatcgttgtcgatcggcacgtaggtcgcggtatccagcgtcgctttgtagtactcgttgtctgagcccggaatggtcaccttaccgttcaggttgacgcgcgaaccttccgttgggaagaagccgcggtcaagcttgttataggtccaaccgtagttgaaggtgaagtcattcgcactgaacgagttccggtcgttggtgttgtccggatactggcccatcgagttaaggtaacgccacattgccacctgcggctgcatattggacagggagttatgcacataaccgacgccggcgcgcagcgtgttgtattcgttgaccgggaagcccagcgtaatgtctgtaccatagcttttgttggtatagtcagacagatccgcatcgttcgcatcaaagtcattatagaagacacgaccgccgaggcttacaccgtctacggtgaagtacgggttggtcaccgacagctcggtataggtctggtagtcgtttttggtaccgttgatcccgacagcatagccagtacctaaccagttatcctgctgaacgcccgcctggaagctgacgccgctctcggtgccgtagccgataccgaagttgaagctaccggtgttacgctctttcaccttgtagacaacgtcgacctggtccgggctgcccggcacgcgctgggtatcagtatccaccgtttcaaagaaacctaaacggttgagacggtctttaccctgatcgacgaggtcgctccccagccatgcgccctccatctggcgcatttcgcggcgcagtacggcatctttagaggtgtcgttgccttcgaagcgaattttacgcacgtaataacggttgcctgcgtcgacgttaacgtgcagcttaacggttttatcgctgtcgttgatctccggctgcgactgcacgcgcggataggcgtaaccataacgacccaacagtttcttgatgtcgttttccatcttggtcactttcgcgccgttgtacagttcgcctggctcaactttagtcagcgcttcgatttccgcggaatggccagcgaggttgcccgtcacctgcactccggaaaacttgtactgatcgccttcggtgatgttgacggtgatgtagatccctttcttatccggcgtcaggctgacctgggtagaatcgatgttgaaacgggcatagccgcgatccaggtagtagctgcgcagggtttcaaggtcgcccgctagcttctgcttctggtatttacggtcgccgaccacgttccaccacggcacctcatcgcgcagctggaagtgggagatcagctcatcggtcgaaaacgcatggttgccgacgatgttgatctgttgaatttttgcggagacgccttcctggaagaccagcttcaaatcgacacggttacgcggcagcggcgtaacgactgctttgacgctggcgctgtatttaccgacgctgtagtagaagtcttcaagacccttctcgatatccgcgatggtcgtgcggtcaagcgactcgcccacccgaacgcctgaggcctcaaggttctgcttgagcatgtcatctttcaccgacttgttgccggagaaagtgatgctggcgatcgtcggacgctctttcacctgcaccagcagggtatcaccatcgcgcaggacgcggacgtcctcgaagttgccagtggcaaacagcgcgcgaatagtgttactgatatcatcgtcggtcaccgtatcgccaggacgcactggcatactgaggagggccgcaccaacagcgacacgctgcaagccttcgaaatgaatgtccttcaccacgaacccttcagcaccgtatacagtcgcgctgctaaacagcagcgacgctatgagcaactttttcatcgccatcgttattatgcgttcttcctaacaaactctcttataaccgagagaaatcattgaaaagtgcaagccccattaacagcaccagcagtattgagccaatgcgataactaaagtcttgaactcgctcggataccggcccgcccttcagcttttcaatcgctaaaaacagcagatgtcccccatccagtacgggtagagggaacaggttgatgattccgaggttcacgctaatcagcgccaggaacatcagataataaatcaacccaaactccgctgacattccagccccctgagcgatagagatcggcccactgaggttgttcagtttgacatcaccggttatcaatttacccagcatcctgaccgtcagcgacatcagctgccaggttttatccgtggcttcagcgatggcggcaaacggtccgtactgacgtactgtcttgtattcttcaggcagcgggatgacctttggcaccacccctgcgaacccttccgccttacctttcaccgttttcgcatccggcgtcagggttaacggcagcgcactcccctgccgttcaatctccagcgccagcgctttgcccggattatcgcgcaccagattaacaaacgtcatccactgcgttaacggttgaccatcgactttaacgatccggtcgcccgcttgcaaacccgctttctgggctgccgatcccgcctgaacctcagccagcaccgtatcaatctgcgcgctgcgcggctggatccccagagaggtcacgggatcttgcttgtctggctcaaacgaccagtgccgcagatcgacgattttatcctggcgctgattggtcccgaaaggggcgacggtaactattgtttgcgggttgccgattttggccaccagctgcagacgcaccgcatcccaatcaggcgtttcgataccatctatcgctttaagttccgttccttttgcaatttgtgcttgcgcggcaaccgaattgggcgttatttcacccaccaccggccgcacgccgggaacgccgatgataaagaccagccagtaagcaaagatagcgaaaatgaagttagcgatggggccggcggcaatcaccgccgcacgctgaccgacggttttattgttgaaggcatagtgacgcatctccggcgccaccgcttcaacacgctcatccagcatcttgacgtagccgcccagtgggatcagggcgatgacgaactctgtgccctgcttatccatccgccgccacagcgctttgccgaagccgatagaaaaacgctcaacccggataccgcagcggcgcgccacccaaaaatggccaaactcatgcaccgtaatcagtacgccaagcgcaatgataaaagccgccagattccagagcacgctcagcatataaccttccgtcaaatcgtcctgaagaccaacagtagcagacaggcgaagaccggtaccgccgccgtcaggctgtcgatacgatcgagaataccaccatgtccgggaatcaagtgcccgctatccttaatgccggcctcgcgcttaaacatactttccgtcaggtcgcccagcaccgaagccagggccgccaccaccgaacagaccagcagcaccgtcggcgtgacgtcaagatgggcccacacgccgtaggcccaggaaatcactgccgcggtcagcaaaccgccaaaaaagccctgccaggttttacccggtgagaccttcggcgccagcttgtgcttgccaaacattttaccaaacatataggcgccagagtccgcgccccacaccaggatcatgacgtacagcagccacagcgcgccgctatagtggttatcggcatagtgccaggcgcgcagcgccagcatgccccagaaaaacgggacgatggtcagaatgccgaagatgaggcgcagcaccttagagtggcgccagaatgccgctgacgccgggtatgagagcaccagcagtaacgcgacgatccaccaggcaaaagaggcccatagcgacccttcaaccatcggttgatgaacgtcatagtggtattcaggcagcagaaaaagcatcgccgccagcagaaggccgcacagcaccgccagccaaacccgctgcgacgtcgaggtaaaaccgctcagttgtccccactcccaggcggcgagcatacagaccaccagggtgacgatagcaaagcccatcggcggcaataaaaacaatgccgcaatgacgatggggattaagacgaaagcagatatcaggcgatacttcagcaaaagtgacccccatcaggcatgactgccacccggctcagtgccgccgaaacgacgctctcgattaacaaaggcatggagtgcaccttcaaagtcctgttcagcaaaatcgggccaaagaacatccgtaaagtaaagttcggcataggcaatttgccaaatcagaaagttacttattcggtgctctcccccggtcctaataactaaatcaacgggagccagttcatgcatgcagacctgctgactcagcatgtcttccgtgatctgctcaggcagtagcgtcccgtcctgtacctgtttcgccagcaaacgaacgccctgggtaatatcccagcgaccgccgtaattggctgcaatattcagcgttaagccggtattgtttgcggttagcgcttccgctttgcggatccgctcctgcaggcgcgcattgaagcgcgtggtgtcgccaataatccgcagacgcacattgtgtcggtgcaggcttttgacttcgctatccagcgcccagacgaacagttccatcagcgcactgacttcctgagccggacggttccagttttcgctgctgaacgcgtataacgttaacgcctcaatcccattattcgccgcgaaggagaccgcgcgacgcacggatttcgccccggccttatgcccgaaagcgcgaattttaccttgccgtttcgcccaacggccgttgccatccataataatggcgacatgacggcagccatgggtgggcgatatttcgctgacagtttgattagcagacaacatcacgcgttttaagtccataataaggattaactagccaccaaacagaggccaccgggccgcgctggatacgcatttttatccggtgccggggctgcagccaatcgcagagaacaaccaaaagctttacgcaaaaaagccgtgttttgtcacggccaccgtaatctttaacaacaaaatgcaacgatcgggtggcgcagactatatcaccgaagccttgcgcccacaaatatcaccgcgttacgcctgcgcaaccaaccgcagcagctgctggtgagcgattgcgcgcgcctcggcgtcgataaccagaacatcatcaatgctttgcggctcctgcaggtccatcttatccagcaccgccaggttaaccgccgcaatatcggtaaagcggatatcgccatgcagaaacgcggcaaccgactcttcattagccgcattcagcgtcgtggtcgcggcctggccgacatcaaacgcgtccatcgccaacttcaggcacggatatcgcgtatagtccggcgcggagaagctcagattgctcaactgacagaagtccagcggtttaacgccggaattcagtcgctgcggccagcccatggtatgggcgatcggcgtacgcatatccggctccccaagctgggccagcacgctgccatcctgatagcgaaccatcgagtggatcaccgactgcggatggatcagcacttccatctgctgggccgaggcgttaaacagccagcgcgcttcaatatattccaggcctttgttcatcatcgtggccgaatcgacggagatcttgcgccccatcgaccagttgggatgacggcaggcctgatccggggtcatcgccgccagttcagccacggccgtctcgcggaaaggcccaccggagccggtcagcaggatagacgagacgccgttccgggcaagatcagcgtatcccagatgctgctgaattgtctccggcatactctgaaaaatagcgttatgctcgctatcgaccggtagcaatcgcgcccccgactgttgcaccgcctccatgaataagcgaccgcaggtcaccagcgattctttattcgctaacaataccgttttcccggcgcggatcgccgccagcgtcggcaccagccccgccgcgccgacgattgccgccatgacctgatcgacctcatccagcgccgcgacctctgccgccgcctgctggccgctcagcacctcggtgcgactgccatgctcatgcagacgggtgcgcaaccgctcagcgctttgcgcatcgtccatcaccgcgtaacggggggtaaattccaggcattgttcaaccatacggtcaacgtttttccccgcgaccagcgcggcgacggaaaagcgaccagggttatggcgcaccacgtccagcgtgctacagccaatggagccggtcgaaccgagaacggttaattgcttcatgagacgtccagaagagtggaaacagaataaaaagcaaaacgccgccagcaagcccctacgcagcaactatcggggatgagacggcggcattaggccttcaactaagcgctaaaggctacaaggccagcggttgcaacgcaatcccgagaattgagcgtacagtcttctgtacggcgtttcagattttactcaggccagagcctgtctggcctgagtaagggcagagcattagaactgcatcagttccgcttctttgtctgccagcgccgcgtcaacttttttgatggcggcgtcagtcattttctgcacgtcgtcctgagaacggcgatcgtcatcttcgctgatctctttttctttcagcagcgctttgactttatcgttggcgtcacggcgaacgttacgcacggcaacgcgcgcctgctcggcttcaccacgcacgatcttggtcaggtctttacgacgctcttcggtcagcggcggcagcggaacacgaatatcgctgccggcagagcttgggttcaaaccgaggtcggaggccatgatcgctttttcaacagccgcggacatagaacggtcaaagacgttgattttcagggtacgggagtcttcgacggtgacgctggccagctggcgcagcggggtcggagtaccgtagtattcaacaacaatcccgtccagcaggctcggagaagcacgacccgtgcgaattttgctgatttggtttttgaatgcttcgacgcatttttccatgcggatttcagcatcttttctgatatcgctaatcacgttacgaatccttgaaagcttgtctcagtcagaccagacggggcacccgtcggaaaatgagctaagtatagtcagatttaatgaaaatcaccgggcaatatccccgcgaaagtaaagcggaatattacccggatttggcgctgacgggaattattccgtgatcaatgtgccttctttttcgcccatcaccacgcgacgcagggcgccaggtttgttcatgttgaagacgcgaatcggtaatttatggtcacgcgccagggtgaaggccgccagatccatgactttcagctctttttccagaacttcgctgtaggtcagctgatcgtacatggtggcagaaggatcttttgccgggtcagcggtgaatacgccgtcaaccttggtggctttcagcaccacatcggcttcaatttcgataccgcgcaggcaggctgcggaatcggtggtaaagaacgggttgccggtaccagcggagaggatcactacgcggttgttgcgcagcaggctgatcgcctctgcccagctgtagttgtcgcatacgccgttcagcgggatggcggacatcagacgagcgttcacataggcgcggtggagcgcatcacgcattgcgaggccgttcatgaccgttgccagcatgcccatgtggtcgcccacaacgcggttcatacccgctttcgccagaccagcaccacggaacaggttaccgccaccaattactacgccaacctgaatacccagctcaaccagctctttgatctcctgagccatgcggtcaagtatgcttgcatcaataccgaagccttctgagccctgcagcgcttcgccacttaatttcagcagaatacgtttgtagacgggttttgcattggtagccatgtttctttcctgagactgtcaacgaatgagatgtgataattccggcgacattgtatgtcgcatttcagcgcggccactataagcagttggctgaatttacaaaatgggcgcaaaaagaagccgccctcaggcggctcctttttttaaaaattaagactgcttggacatcgcagcaacttctgctgcaaagtcagtctcaactttctcaatgccttcgcccacttcaaagcggatgaagccagtcacgtcagcgttgtgctctttcagcagctggccaacagatttgctcggctccataacgaaaggctgaccagtcagagaaacttcgccggtgaatttcttcatgcggccttcaaccattttctctgcgatttctttcggcttaccggactgcatcgcgatgtccagctgaacctggtactctttctctaccacttcagcagacacgtcttccggcttaacgaattccggcttgcttgcagcaacgtgcattgccagctgcttaaccagctcttcgtcagcgcctttagcggcaaccagaacgccgatacgcgcaccgtgctggtagctgcccagaacgtcgccttccagaacagcgatacgacggatgttgatgttctcgccgattttagcaaccagcgcaacacgttcttcttcgaactgcgctttcagaacttcaacgtcggagattttacctgcaacagcggcgtccagtactttgtcggcaaatgcctggaaaccaccatctttagcaacgaagtcagtctggcagttaacttccagaatgtaaccgtagttgccttcgattttggttttgatcacgccgtcagcagccacgttgcctgctttcttcgccgctttgatcgcgccggatttacgcatgttttcgattgccagctcgatgtcgccattcgcttcagtcagcgcttttttgcaatccatcatgcctgcgccagtacgctcgcgcagctcttttaccagggaagcggtaatttcagccattctaaaatcctcgggagatgtggatactgcccggccaacggccaaacagcgtaaattgaaaaaaggggccgataatgggcccctattcatacacggtactaataagggcttaaaccttattattcagcttctacgaagctttcttccgcctgagaagccaggtcctgagagcgaccttcacgaacggtagcagcaacagcgcccaggtacaggcttactgcgcggattgcatcgtcgttacccgggataacgaagtctacgccgtccggatcagagttggtatcaacgatagcaaataccgggatgcccaggttgtttgcttctttgatagcgatgtgctcgtggtcagcgtcgataacgaacagtgcgtccggcaggccgcccatatctttgataccgcccaggctgttttccagcttgtccagctcacgagtgcgcatcagcgcttctttcttggtcagcttgtcgaaagtaccgtcctgggactgagtttccaggtctttcagacgtttgatggactgacgaacggttttccagttagtcagcataccgcccagccagcgatggttcacgaagaactgatcgcagctcagagcagcgtcttttaccgcttcgcttgcagcgcgcttagtaccaacgaaaaggattttacctttacgagcagcgatcttgttcagttcagccagagcttcgttgaacatcggtacggttttctcaaggttgatgatgtgaactttgttacgcgcgccgaagatgaaaggcttcattttcgggttccagtaacgggtctggtgaccgaagtgaacaccagccttgagcatgtcgcgcatggaaacagttgccatgtttaaaacctctatagattaaattggggttatgcctccacgtatcccatattaccgaccccgaagggcaccccggaatatgtgccgatacgtgtgtgttattacacaaagtgagctatgtcgcttacgtccatccttgtgtatctgagatggaacggaagtccggcgcgctttataccacaaaatccatccagacaccaactcttgttgacgtcgcgtgctgttaatgattctcagtttggcaccagcctgcccggactgttaccattgacaggacttactctattattgtcgaaaatatcgacactgctggacatactccatggctatctctattaagacatctgaagacatcgaaaaaatgcgcgttgccggccgcctggccgccgaagtgctggaaatgatcgaaccctacgtcaaaccgggcgtcagcaccggcgaactggaccgcatctgtaacgactatatcgttaacgagcagaaggccatttccgcctgcctcggctatcacggctatccgaaatccgtctgcatttcggtcaatgaagtggtctgtcacggtatccctgatgacggcaagctgctgaaagatggcgatatcgtcaatatcgacgtgaccgtcattaaagatgatttccatggcgatacctccaaaatgtttatcgtcggcaaaccgacgattctcggcgagcgcctgtgccgcatcactcaggaaagcctgtacctggcgctgaagatggttaaaccgggcatcaacctgcgcaccatcggcgcggcgatccagaaatttgtggaagccgaaggtttctccgtggttcgcgagtactgtggccacggcatcggccgcggcttccatgaagagcctcaggtactgcactacgattcgccggagaccaacgtcgtactcaaaccaggcatgaccttcaccatcgagccgatggtcaacgccggtaaaaaagagatccgcagcatgaaagacggctggacggtgaaaaccaaagaccggagcttgtctgcgcagtacgagcatactattgtggtgacagacaacggctgcgaaattctgacgctacgcaaggatgacaccatcccggcgataatctcgcacgatgaatgatgaaaagccggcgcccgccggcttttttattagatagttttttcttatggtgacgcgatgagcaactcattacctgacacagcctcccctctcctgcccgtcccgccggaacacccggtgagttggccgcagggcgatctgaactgtgccgcaatcaaggcgcacatcgataccttccagcactggctgggcgaggcgtttgactccggcatcgtcgcggagcagctcatcgcggcgcgcaccgaatttatcgaccagttgctgcagcgattatggatcgcctgcggttttgaatccgtcagcgacctggcgctggtcgccgtcggcggctatggccgtggcgaactgcacccgctctcagacgtcgatctgctgatcctcagtcgtaaaaaactgccggacgaccaggcgcaaaaagtcggcgaactgctcaccctgctgtgggacgtcaagctggaggtgggccacagcgtacgcaccctcgaagagtgcctgctggaaggtctctcggatctgaccgttgccaccaacttaatcgaatcgcgcctgctgatcggcgacgtcgcgctgttccttgaactgcaaaaacatatttttagcgacggcttctggccatcggaaaagttcttcgccgccaaggtcgaagagcagaacgtccgtcatcagcgctatcatggcacaagctataacctcgagccggacgtgaaaagcagccccggcggcttgcgcgatatccatacgctacagtgggtggctcgccgccatttcggcgccacctcaatggatgagatggtcggcttcggctttctgaccgaagccgagcgcaatgaactcaatgagtgtctgcatcagctgtggcgcatccgtttcgcgctgcatctcgaactcacgcgctatgacaaccgtctgcttttcgaccgccagctcagcgtggcccgccggctaggctatgaaggcgacggcaaccagccgattgagcatatgatgaaggacttcttccgcgttacccgccgggtgagcgagctgaatcagatgctgcttcagctgtttgaggaggctatcctcgccctgaccgaggatgaaaaaccacgcccgatcgatgatgatttccagctgcgcggcacccttatcgatctgcgtgacgacacgctgtttattcgcgaaccgcaggccattctgcgcatgttttatatcatggtgcgcaatagcaccatcaccggcatctactcaacgacgttgcgccatctgcgccacgcccgccgtcatctcacccagccgctgtgctatatcccggaggcgcgcacgctctttcttagtatgctgcgccatcagggggcggtaagtcgcgggctgctgccgatgcatcgccacagcgtactgtgggcctatatgccgcagtggtcgcatatcgtcggccagatgcagttcgacctgtttcacgcctacaccgtcgatgaacacaccgtccgggtgatgctcaagctggaaagctttgccaaagaagaaacccgcagccgccacccgctgtgcgtggagctgtggccgcgcttaacgcacccggagctgatcttaattgctgccctgttccacgacatcgccaaagggcgcggcggcgaccactcgatcctcggcgcgcaggatgtgctgaagtttgccgagctgcacgggctgaactcgcgcgaaacgcagctggtcgcctggctggtgcgtcaccacctgctgatgtcagtcaccgcccagcggcgcgatattcaggatccggaggtgattaagcagttcgccgaggaggtgcaaacggaaaatcgtctgcgctatctggtgtgtctgaccgtcgccgatatctgcgccaccaacgaaaccttatggaacagctggaagcagagcctactgcgtgaactctatttcgccaccgagaagcagctgcgtcgcggcatgcaaagcaccccggacatgcgcgaacgagtgcgtcaccatcagctgcaggcgctggccctgctgcggatggacaatattaatgaagaggcgctgcatcagatctggaaccgctgccgcgccaactatttcgtgcgacatacgccgacgcagctcgcctggcacgcccgcaacctgctgcgccacgatctgaataagccgatgatcctgctgagctcgcaggccacccgcggcggtacggagatttttatctggagcccggatcgcccttacctgttcgccgcggtgtgtggcgaacttgaccgtcgcaacctcagcgtccacgacgcgcagatcttcaccacccgcgacggtatggcgatggatacctttatcgtccttgagcccgacggcagccccctttccgccgaccgccacgaggcgatccgccaggggctggagcagaccatcactcagcgcagctggcagcctccggccccgcgtcgtcaggcggcaaagctacgccatttttccgtggacaccgaggtgaatttcctgccgacccataccgaccgaaaatcgtttctggagctgatagcgctcgaccagcccgggctgctcgcccgcgtcgggcaggtgttcgccgacctcgggatatcgcttcacggggcgcgaattacgacaattggtgagcgagtagaagatttatttataatcgccaccgccgaccggcgtgcccttaataatgagctgcaacaagaagtgcaacaacggttgacagcggccctcaatccaaacgataaagggtgacgtattttttttagtaaatggaaagaaacaatgcagcagttacagaacgttattgagtccgctttcgagcgtcgcgccgacattacgccggctaatgtggataccgtgacccgcgaagcggttaaccaggttatcgcccttcttgattccggcgcgctgcgcgtcgctgagaagatcgacggtcagtgggtgacgcatcagtggctgaagaaggcggtactgctctctttccgtattaacgataaccaggttatcgatggtgcggaaagccgctacttcgataaagtgccgatgaaattcgctgactacgacgaagcgcgtttccagaaagaaggtttccgcgtggtgccgccggccgccgtgcgccagggcgcgttcatcgcccgcaacactgtgctgatgccgtcctacgttaacatcggcgcctacgttgacgaaggcaccatggttgatacctgggccaccgtcggctcctgcgcgcagatcggtaaaaacgtgcatctgtccggcggtgtcggtatcggtggcgtactggagccgctgcaggcgaacccgaccatcatcgaagataactgcttcatcggcgcgcgctctgaagtggttgaaggggtgattgtcgaagaaggctccgtcatctccatgggcgtttacctcggtcagagcaccaaaatctacgatcgcgaaaccggcgaagtcttctacggccgcgtaccggctggctcggtggtggtctcaggcaacctgccgtcgaaagatggtaaatacagcctgtactgcgcggtgattgtgaagaaagtcgatgccaaaacccgcggcaaggtcggcattaacgagctgctgcgcaccatcgactaaagcaaataaaaagcgggagatatcccgctttttttatatttgatgctggcgaaaatggattttttcgttaattattcaatggttatgatgctatcaaaggtaccgttatgtacgataatctgaaaagtcttggcattaccaaccctgatgagatcgatcgctatagcctgcggcaggaagctaacaacgacattctgaaaatctattttcagaaagacaaaggcgaattcttcgccaagagcgtgaagttcaaatatccgcgtcagcgcaaaaccgtcgtcgccgacggcgtcggccagggctacaaagaggtccaggagatcagccccaatctgcgctacgttatcgacgagctggatcagatctgccagcgcgatcgcactgaaatcgatctcaagcgtaaaatcctcgacgatttacgccatctggaaagcgtggtcaccaataagatcagcgaaatcgaagccgatctggaaaagctcacccgtaagtaagagcatcccggcggcgcgttgcctggccgggctggtggtctctatccactccagacagcatgcatcgtccaggccgggtatggcgcgtcgctacccggcatttttttgcctccacgtcttagcgttgttcgtccagctgcagcgcgatatacagcagcagcctgtcgtcaaagctaccgagatccaggccggtcagctccgagatacggttcaaccggtactccagcgtattgcgatgaataaacagcgcctttgacgtcgccagcggctgcacgttatggcgaaaccacgcctgcagcgtccgccgcagcagcccgttgttgtccatggccttcaaacgcgccagcggacgggccagctcattggcctgccagccgccgcgcaggctgtcgagcagcaccggcagcatcagatcctgatagaaataactgcggctctccggcatccgctgcttgccaaccatcattgtcgtccgtgcggtacggtaagagcgggcgatacttcctgggccggtgaagaagttgcccagcgccacgcgaaagcgcagctggccattctctttcatcctggcgataagctgctcgacgcgccggacgtgatcgtcagcgtcccagcggccaaagctgttcagcgccggtttcagcaccaccatttccgtgagcgagacaatggccaccagattattgcgatcgggggtggtcagcgcgttctgtaactgttgcagttccgccatcgcgctgtccacgccgagctgaccgctgtctacctcaatcatcgccaccacgcgcggctgattgagatcgatgcctaaacgctgagcccattcgttcagcgccggggtatgctcttccgcctgaatcaggttcatcaccagctcttcgcgcagacggctgtcctgggccaggagatgcatcagccgcgactgctccagcatcatctctgctgtcatgcacaccagctcgccatattttcgcagcgactccggctcgccggtcaggccgatcaccccgacgatctccccctccaggcgcagcggcaggttaatcccctggcgaaccccgtgcagatggcgagcgaccgcgtcgtcgatatccaccacccgcccctgggagaggaccagcagcgcgccttcgtgcaattcaccaatcctttcccgatcgccgctgccgatgatccgcccgcgggcatccatcacgttgatattggtatcgatgatgcgcatggtccgcgccacaatatcctgcgccattttggtatcaagatgccagccagccatgtagtcctcccctttgctgggcaccagcataaaagagtcatcgtcgcgctgcattgtgcatttgcactaagccggggtgagatatgtggagttgtgggggcggtcacagaacgaaaaaagcccctgccctcggcgagggaaggggctgggaagcgagcgctggcggttactgcaacagcagatagatagaggcgtcgccgcgctgaatgttcagcgccagtacggacggtttggcgtcgaagattttccgcagatcggcgatgtttttcaccggctgctgattcgccccgacgatgacgtcgcctttcttgaggccaatctgtgccgccggggtaccggctttcacattattgaccaccacgcccttatcctgacccttattgctcatttccgccccttcaatcccgttgaagatggtgctggagtcaacctgggtctggttgctctgctgcagttcgacggtcacggtcaccggtttgccgtcgcgcagcagaccaagctcaactttgctgccgataggcatggtgccgacctgggcacgcaacgcggcgaagctgctgatcgctttcccgttgagggaggtgatgacatcgccggctttaatgcccgctttcgcggccgccgaacctggcattacctggctgacgaaggccccgcgctgggcatcgactttcatcgctttcgccagctcagagttcagttcggtgcccataatgccgagctcaccgcgtttcacctggccatatttcaccatctgctcggtcaggtttttcaccatgttgctcgggatagcaaaaccgataccgatgttgccgccgtccggcgccagaatggcggtgttgataccgatcagctcgccgttgaggttcaccagcgcgccgccggagttcccgcggttaatcgccgcatcggtctggataaagttttcgtagttttccacgttgaggccgctacggcccaacgcggagacaatcccggaggtcacggtttcgcccagaccgaacgggttgccgatagccacggtgtaatcaccgacgcgcagcgcatcggagtcggcaagcttaatcgccgtcaggttttttggctcctgaatctgaatcagcgcgatatcagagcgcggatctttgccgacgactttggcatcaaacttacggccatcgctcagctgaaccttaatcgtggtggcgttgtccacgacgtggttgttggtcaccacataccctttggcggcatcaatgatgacgccggagcccagcgccataaatttctgctgctggccgccgtcaggctgaccgccctgtccgccgccctggcaaaacggcgaactctggaaaggagaaccatcctggcagaacggcgaattatcgccaaagaactgctggaagttgcgtggcatccgtggagtattaacggtggtgctaccttcaacgttaatgctcaccaccgacggcatcaccttctccagcatcggggccaggcttggcatctgctgtgcattagtggccgaagatgccgtttctgccgcgctcgcagagagcggggacaacgccagacctaaactcagagccagtgcactcattgctaacgtggtttttttcatcagtttcaatctcaatatcaggtaacgaaagttgctgtgtacgtgactatcagagtcattttataacgctaagttccggaattaagtttctggaaaaagtaaaaatttattgtccatctttacaaaactccagcctattccaccgccatgagacgccgatattcatcccacgcatacaaatccgtcatcccgctgatatagtcctgaatcagacggcagcgataatagtattccatcagcgcaaattcgggcgccgtacgcgccagtttatttaccgcttcaacataggccagccggtgacgggtcgaaagtttctgatacagccgggaggcaatgggtaaacgtcgtacccgctcctgcgctactaattcgctgaaatcctccagcgataatttcagcagcggctgatagatatccaacaggccgctgatcacccggtagccctgcaattccagctgctcaacatccggatggctaaagacctgtttcatcgccacatttttatagagctccagtagctgactgcaatcgctgtcgtcctccagcaacgcatgattaaagtcccccgtgaagattgccggcaggttgtcaataaatcggcgcgccgcgtagggcaccagcttattcagcgtattcacccgcaaatacataaaaaactgatcttccgcgctctgcttcagataattagctcgcgatttctcccaggcattttctactacctgcgaaaataacgagcctttttcatgactgccccaggcgtcgtaaagatgctgatagagctgttctgcgctaaaaatacgtttttccaccgcgtcctcgagatccgcgacgcaatatgagatgtcatccgcagcctccataatccaggttaatggaaaccgattgtaaggcgcgagatccagttctttacgcaaacgcgcgacatactcttcttcggctaaataatagccaggtttcttcattaaataactgtggctggccggcgtctcctcagaccaccacgccggacgagtatatttcaggatacatcccacctgcgcccaggtcaggttcatacgcattagcgtatggaccagacgaatgccctgcgcgttgccctcaaagctgcagagatcctggcgcactttacggcgcagcgcattaagcgatgtctctccgtcatgcaggcgtaaggcctgcacttcgcagcgatcgtcggtcagcggctgcccgagcgcatcgccgggcgccaggcgctgacggaaccagtcgttaatcgccgcttcgccaaaatggccaaacgggggattgccgatatcgtgcatcaggcaggccatctccaccacgctctcgaatggcccggtcagctcttccaggccatactcttccagcagcctcagctctttcagccggctcagcacctctttggcgatatagcgccccacctgctgcacctccagcgagtgggtcaggcgagtgcgcaccgccgcgttgcgctcgagcgggaagacctgagttttttgctgcaggcggcggattgccggcgagttgacgatccgtccccgatcgctttcaaagatccgcaggatgtcgcgctccgtctccacccgcggcggcgaacggaagcgtcgacgccagtttatcttgttgcgaaaatcaatctttgccatagcctctcccgcgcgagcaatacgcttccccttaagcgcatgatagactatgcaactaaacctgacacatcgcgagtaaatctatgaaaattggcattattggcgctatggaagaggaagttacccttctgcgcgacaaaatcgaaaaccgccagaccatcaccattggcggaagcgaaatctataccggccaacttcacggcgttgacgtcgctctgctgaagtctggtatcggaaaagtagcggcggcgatgggcgcgaccctgctgctggagcgctgccagcctgacgtgatcattaataccggttctgccggcggcctggcgtcgacgctgaaggtcggcgatatcgtcgtctccgatgaagcgcgctaccacgacgccgacgtcaccgccttcggctatgaatacggccagctccctggctgcccggcgggttttaaggcggatgaaaaactggtggccgccgcagagagctgcattaaagcgttagatctcaacgccgttcgcggccttatcgttagcggggatgccttcattaacggctctgtcggtctggcgaagatccgccataatttcccgcaggcgatcgccgtggaaatggaagcgaccgccatcgcccacgtctgccataactttaaggttcccttcgtggtggttcgcgctatttccgacgtggccgaccagcagtcccacctcagctttgaggagttccttgcggtcgccgccagacagtccaccctgatggtggagaatctggtacagaacctggcacgtggctaagtcgctatccttcgcgcttgccgcgctgctgttactcgccccggcgtggctgctggccgcgccgcgggtgatcaccctcccccccgccaataccgaactggcctttgccgccgggatcacgccggtcggcgtcagcagctattccgattatccttcgcaggccaaaacgatcgaacaggttgccagctggcagggaatgaacctggaacgcatcgtggcgctcaagccagacgtggtgctggcctggcgcgggggcaatgccgaacgccaggttaaccagctgcagtctctgggtattcacgtcctgtgggtacagacctcgaccatagaagagatcatcgctaccctgcgtgagctggcgcagtggagcccgcagccggaaaaagcacagcaggcggcgcaggcgatgcagcaggaatacgatgcgttgaaagcgcgctatgccaacgcgccgaagaaacgcgtcttcctgcagttcggctccgcaccgctgttcaccagcggccccggttcgattcaggatcaggtgctaaggctttgcggcggcgagaatatcttcgccaccagccgcgttccctggccgcaggtgagccgcgaacaggtgctggcccgccagccgcaggcgatcgtggtcaccggggatgccagccgcattgccgaagcgcagcgcttttggcaacatcagctcaccatttcgttgattgcgttacacagcgactggtttgaacgcgccggcccacgtattatcctcgccgccaaacaactttgtgcggcgcttgaccaggtaaaataatcatccggcacaccggatgttcagtgggaatcaacgatgcttgtctattggctggatattattggcacagctgtcttcgcgatctccggcgtactgctggccggaaaactgcgtatggacccattcggcgtgctggtgttaggggtagtgacggcggtaggcggcgggaccatccgcgacatggcgctggcgaatggcccggtattctgggtcaaagatcccaccgatctggtggtggcgatggtcaccagcatgctgaccatcctgctggtccgccagcctcgccggctgccgaaatggatcctgcccgttcttgatgccgtcggtctggcggtgtttgtcggcattggcgtcaataaagcttttctcgctggcagcggcccgctggtcgcggtgtgcatgggggtggtgaccggcgtcggcggcgggattattcgcgacgtgctggcgcgggaaattcctatgattctgcgtaccgaaatctacgccaccgcctgtatcgtcggcggtattgtccacgccacggcacacgacacctttcatctcccgctggagaattcggcaatgatggggatggtggtcaccctggtaattcgtctggcggctattcgctggcatctgaagctgccgacgtttgccctggacgataacggtcggtaataaaagcaaaacggtaaccttaaggttaccgtttttagggtttgctccctcccgctgggggagaactcgctttaaacgctgaacgaggagccgcagccgcaggtgcttttcgcgttcggattggtcacgataaagcgcgaaccttccagcccttcggtatagtcgacagagccaccgaccagatactgcaggctcatcgggtcaaccaccaggccgacgccctgtttctcaatggtcatatccccttcgttcacctgatcgtcaaaggtgaagccatactggaaaccgctgcaaccgccgccggtgatatacacgcgcagtttcaggttcggattatcttcatccgcaatcaggtgttttactttattggctgcggcttcggtaaactccagcggcaacgctacgtcatcactcattttctgctcccattgatacttccggccggttaaagaataaccggaccttttgagccattatctaataccctggtaaatcgttcaagtattctcccggggagcctgctgcgcttttgccgcctgctcggcttcctgcttcgccagagtacgctgcagaatggtcgaatacaaaggcttaccgccgaggaattgcgccagtagtgttgcgccaaggcaggtaataatcattggcaaaatgagctgatagttatcggtcatctcaagcaccagcacgatcccggtcagcggcgcacgcaccgaggcggcgagcagcgcccccatgccggcaatcgcgaaggtgcccgcatcgagatggtaggccggaaacagcggaatagccgccatgccgaacgccgtgcccagcagcgtgccgagcgccaacataggcgcgaaaatgccccctggcgcgccggaagagaagcagatcagcgtggtcaccacgcgggcaataaagataaacagcagcagtccgacggagaagttaccggcagcggcgatagggatcaagttaaagccaccgcccaccgcggagggctgcatcagccccagcagaccgcagagcccgccgattaatccgccaatcaacacccattttttgatgttgccgccgtggatgcgctggaacagatcctgagtgcgcagcaccagaaaattaaacagcgggccaaagcagccaaacagcatgcccagcaccagatacagccatagggtatttaccggggcgttgcttagtttacccacctcaatgatcgccgcttcgccgttgaaaatgcgaaacacaatgctcgacatgatcacgccggtaaacaccgctttaatggagatcaggttgtagcggaactgcgggcgcatctcttcgatgataaacagaataccggccagcggcgcattaaaggccgccgaaagccccgacgccgcaccggtcgccaacagcgtatgccgcgcttccggactgcgcatgcggaaaacgtccagcaccatgcgcccaatgttgccgccaagctgtaccatcggtccttcacgacccagcaccatcccggcgccaagggtccccatgccgccaacgaatttcaccggcagcacgcgccaccagcgcaccggccgcagctcctccagcgcgccctcaatttccggaatcccggagccgccggcctccggcgcaaagcgacgcaccagaaaatagccgaccatcgccagcagcgccgacaggataaacgccagcggccagaccagataccagtggtccgccacctgcgccagcgcgccgatccgctggttctgcacccagttcacgctcttttcaaaggcgacgcccaccagccccgccagcgtgccgaccactgccgccataaacagcaccgccagcggcgttttatcgcgttgaatcagacggcgcaccgcatcgccgcgacgcacccgcacaaactgatgtgcttcaaaagagggagtttctgctttcatgccgttatcaattattggtaatacaaatgaagagagcggcattttagccgtcccggcgcgctgcgtcgtcaaaaaaatgcccttgcggcacattgtttcaattgggcaaaactttcataaccatcctggaataacttagaatagccgataaaacatttttcacgaaccaggaccctggccatgagcaaatctgaaaatctgtatcacgctgcgcgcgaactgatccccggcggcgttaactcgccggtgcgcgctttcaccggcgtcggcggcacaccgctgtttatcgaacgcgcggatggcgcttacctctatgacgtggatgggaaagcctatatcgattatgtcggttcctggggtccgatggtgctgggccacaaccacccggctatccgcaatgcggtgatcgaggcggcaacccgcggcctgagctttggcgcgccgaccgaaatggaagtgaaaatggcggccctggtgaccgagctggtgccgaccatggatatggtgcggatggtgaactccggtaccgaagcaaccatgagcgccattcgcctggcgcgcggcttcaccggtcgcgacaaaatcattaagttcgaaggctgctaccacggccatgccgactgcctgctggtgaaagccggttccggcgcgttgaccctcggccagccgaactcgccgggcgtcccggccgatttcgccaaacataccctgacctgcacttataacgacctcgcctcggtgcgcgcggcgttcgagcagtatccgcaggagatcgcctgcatcatcgtcgagccggtggccggaaatatgaactgcattccgccgcagccggaattcctgccgggcctgcgcgcgctgtgcgacgaatttggcgccctgctgattatcgacgaagtgatgaccggcttccgcgtggcgctggcaggcgctcaggcttactacggcgtggagccggatctgacctgtctggggaaaatcatcggcggcgggatgccggtaggcgccttcggcggccgccgtgaggtgatggacgctctggcgcccaccggtccggtctatcaggcgggcaccctctccggcaacccgatcgccatggcggctggcttcgcctgcctgaacgaagtggcgcagccgggggtccatgaaaccctgactgaactgactaaccagctggcgcaaggcctgctggatgcggcacgtgacgccgggatcccgctggtggtcaataacgtcggcggcatgttcggcatcttctttaccgatgccgaaaccgtcacctgctatcaggacgtggtgaagtgcgacgttgaacgcttcaagcgcttcttccatctgatgctggaggaaggcgtgtacctggcgccgtcagcgtttgaggccggctttatgtccgtggcccacagcgaagaagatatcgacaacaccatcgacgccgcgcgccgggtatttgccaagctgtaaggtgcttgaatgcctggtggcgcagggattttcccggaggaggcgcattgcgccttatccgggctaccaaatcgcacagcgctgtagccccggtaagcgatagcgccaccggggatgttgaagccatccaggaccgttagcgactctgctttctcagcaaataaataaagtaaggcgcgccgataaaggtcgacagtagccccgccgggatctgatacgggaacatcatcatccgtccgcaccagtcggcgaagaccagcagcagcccgccagtcagccctgaaatcaccatatgcggtagggttcgccggaagcccatcatccgcgcgatatgcggcgccatcagcccgacaaagctcagcgggccgatggtcagcgtcgccgccgccgtcaggcaggccgccagcagcagcagaacaatccgcgatgacgtcagcgccatgcccaccgctcgcgccgcctccccgcccagcggcaggatggttaaccagcgacgacagagcggcgccagcgccagcagcgccagcattaccgcgccgctacgcactaccctctccggcgtcgcgctatatgtcgaccccgagatccacgtcaggatctgcgccatacgcggatcgccgctggcctgcagcatcatcagcagcatagtgaaggcggtgctcagcgccatccccgccagcagcatccgatgcggcgagaagccgccgcgcccggcggcgagcataatgatcagcaaggtggccgccgcgccaaggctgccggccggcagcagccagccaaaggcgtcgccaggcacgaagaacagcatcagcaccacgccaaaagccgcgccggagctgatgcccagcacttccgggctggccatcgggttgccggtcaggcgctggataatacagccggcgaccgccagcatgaccccggcgaacagcgccgacagcacccgcggccagcgccagggcagcagttgctccagcagatcgccgtgggcccacagccagccgtgggcatcgcgaccaaaggccagcaccacgctcaccgccagcagcagccacgcgacgcctgcgagaacaaaccattgcacatgatagcgctcaggctgcacattatcgccgccgttcatcaccggggcgctgatgctgcgcaaccgcggcagcagccacagcagcagcggcgcgccaatcagggcggtgaccgagccggtggagacttcccgccatacccggctcagccagaggatcacctgatcggaaagccacaggagcagcgcgccgatcagcgccgccagcagcagccgcgccagcagccgacgggcgccaagcattttcgccagcagcggcgcgaacaggccgataaagccgataatccctaccgcgttcaccagcagcgcgctgatgacgatcgccagcgtcagggcgccgaggcgcgccagggacagcgccagcccgaggttacgcgccaccccgtcatcgagccccatcagggtcagcggccgcagcagcagcaaggtgagtattgccccgccaagcagctgcggccacaggcgctgcgccacgctccagtcggtctgcgtcagcgtcccggtgctccacaggaacatgctttgcagctggtcgtgatggaaaatcaccatcagctggttaagcgcgccacagtaaaggctgaccaccagccccgccaggatcagcgttaccggcgacaggcgcttgccccacgagacgccaaacaccagcgcgcccaccagacaggccccggccagcgcggcgaattgcgacgccagcacgccgggaatagcccataacgtggtgaccgttatccccagctgcgcgccggtggcgacgccaagggtggtcggttccgccagcggattacgcagcacctgctggaacaggacgccaaccagtcccagcccggcgcccaccagcagcgcaacagccagcctcggtaacaaactgtaatgaaacagcatttgggcgatatcatcgacatccggctgccacagcgcctgccgccactgcgcatagggcaaggcgacattgaggttgacgatgctcagcgcgaaggcgacgcccagcagcccggccagcaggataatagctaacggcgagagacgcgtattcatgccggactcccctgggcatcagccagcacgcgggcaaaatgcatcgctgacagcgtcgcgccgtagaaccagaccgccggaacgcgctggaagcggcccgcgcgcacgaagggcatcgcctgccatagcggcgtcgccagcagttgagccatatctcgctcattgccatggtcgaaacagatgacatcggcttcgttaaatgccgccagcctgtcgatgccaacgctaacgcttccccagaatgccgcttcgccgtgccaggcgtttttaataccaaagcgatcaagcacctcctggaacaggcagttttcgccaaacaccagcacgtgccggggatcgagcagagagatcatcagcagcggacgatcgccgcgcccggcaaaacgcggacgcaggctctccatcagcgcgtcgaactccgccagatggcgcttcgcctgctgcgttttgcccagcagatcggccatttccagtagcgaacgctgggccatcgccagcggccgtttgccgtcgctgaaggtgaaaccgcggccgggcgcgatacgcgccagcttctccggcgacgggccgtagcccgccgaccagacgataaacgacggtttcatctgcgtcagcagttcaaggttgggttcggtacgcagaccaacatcgatcaccgagtcgggcagcgcgggttcgttcacccacaagcgatagttgggaatatcggccacgccatagggcgtcacgccgagcgccagcagcagctccgcgggcagccactccagggcgaccacgcgctgcgggtcgacgtcggccgcctgcgcgccgcgcatctgccacagcagcggcgagagcgccatcgcgatcagcaggcggcgtcgggttatcagagttgggttcatcatcaatagacaaagcttaccggcgccgcaccggccgggtgtggcaggatccccatcgggatgccatagatctgttccagagtgtcgctgcgcatcagttccgccggcgtcccctgagcaatcatttctccgccgcgcagggccaccagatagtcgcaatagcgggccgccatattaatatcgtgcaggacggcgatcaccgtcaggccgcgctgctggctgagacgatgcaccagcgccagaacatcgacttgatgagcaatatccagcgccgaggtgggttcatcgagcagcaggcagcgactgtcctgcgccaccagcatggcgatccacgcccgctggcgttcaccgccggagaggctgtccaccagacgatgagcgagcggcttcagccccaccagcgcaatcgcctcttctactttctcacggtccgctgcgccaaagcgacccagcgcgccgtgccatggatagcggccgatcgccaccagctcgcgcaccgtcataccttcggccggcggcagctgctgcggcagataggccactttgcgggcaaaggctttgctgccccagctctccagcggctgcccgtccagcagcacttcgcctgcggagggcggctgatgacggccaagcattttcagtaacgtcgatttgccggagccattatggccgatcaggcctgtgactttcccggacgggaaggtgagcgagagcggatggagcaatgtgcggccaggcacacggaaagtgacgcgatccagcgcgaaggtggtttctgcgtgcggagtctgttcctgcatagcgataacctgatagagggcgcggcgaaccgcgcccgtaggtggttagaaacggaaggtggcggtggcgacgacctgacgtccggcgccccagtagcaggcgtattcgctgtagcaactggagacatattcgcggtcgaacaggttgttgacgttgacgccgaccgacgatcccggcaggccaaagcgcgccagatcgtatttcaccgtcgcatccatcagcgcataaccggccacactaaaggcatcatttttcttaccggtgctggtgtcatttttgtagtagctgaccgttgaaccgatatagcgcgccccggccccaatcgtcagaccactcagcgcggtttcgtggaaggtataatccgcccacagggaggccatgttacgcggcacttccgccggacgtttgccgttgaacaccgtatcgtgagtgtactccgcatcggtgtagctgtaggctgcggtgacgttaatattagcgttcaccgccgccttcgcctccagctcaaggccgcgggagcggatctcgccggtctggatgctgaacgcctggttagccggatcagccgtcaggttcttgtctttggtcagctgatagaccgccgcggtgaccaccaccggcatatctttcggcacgtatttcacgccggcttcatactgcttaccgcgcgacggatcgaacggctggccgcggctgttggaacccgataccggttcaaacgattcgctgtagctgaagtacggagagatgccgttatcgaacaggtagttgatgccgccgcgccagctgaactgctggtcgtgattctccgccaggctgttggtggcgcgggttaacgttgaggtcgtggcgtaatcgtaacggccgcccagggtcatcacccatttatcccactccatctgatcctgcgcgtacaggccggtctgctccatccggttgaggaccgcgtacgggaaggtgacctgaatattcggattgccgtactgcggattgctcatgctgataggatccgccgtcccgtagtcggcatccacatcgttacgcatccgcgagtagtccacgccggtcagcagcgtatggctgaccgcgccggtggcgaaatcagactgcagctgggtatcgacggtgaaggtgttcaggtgctcgtcggagcgcacgtaggcgcgattcatgtagcccggcgcgacatagccgttgccgtataccgaacgatagagcgtatgcacatcggcatagcgcaggttctgccgcacggtaaaggtgtcatcgaactgatgggagaagctgtagcccaccatcttctggcggcgggagattttattatcggactcgccttcgttgaaatcggtcggcagcttgtgcgccttaccgttggcgtcgtaatacggcaccacggtgccttcgcgcggcagccagccgtagtagcccgcatccgggtcattctggaagttgctcaggaaggtgaagtcggttttatcgtccggacgccagctaaaggagggcgccaccgcgtagcgagtcgatttcgccatctgctgctgggcatcctgactgcggccaaggccggtcaggcgatacgaccaaacgccggcatcatcaatggcgtcgctaaagtcaaacccggtctgccacagattgtcggtgcccatcttaaactgcacttctttcagcggctcggtagtcgggcgcttgctgaccatgctgacgataccgcccgggttgctgttgccgtacagcaccgaggttggcccgcgcatcacttccacacgctcgaggaagtaaggatccatggagacttcagagtagttattcccctgcagcttcatgccgtccagatactggttggtgttgacggtcgtcgaggtggtgaagccgcgaatggtgaccacgtcataggtggtcgaactgccgcgagtggagaagacgctgggcgtataggagagcgcctcttttaccgtcgtcggctggcgcatctccatctcctggcgcgtcaccaccgacacagactgcggcgttttttcaatcggggtatcggttttggtcgccgtggcggagcgttttgccgcgatagtcggcgccggtccccaggcgctttcctgggcggccggggcggcaacgacggtgatggtttcttcttgcttcggttgttctgctgcctgtgcgtagacagacatgccgctaaccgccgtggctactacagctgcgactttacgcagcgagtgatttggctgagcagtttttggacgcgccatgggtatatctctgatgaaagtgaatgataacgtaaacgagaattattattatgacgggcgatataataggcgaaacgtcgaaggcaaggcaagcgatatgcctgtcgccgccggtcgaaggctgaattaataaccagatagttattatggagttaaagagccgttaacttttttacaggcataaaaaaaccccttaatactttcgtattaaggggtctggtcgtgcggtcaaaatcagttactgccgaacatatccttgatccagcccgcgacgccgtcgctcttttcctgctgcttcggcggctgttgctgctgttgctgttgctgctgttgctgctgttgctgctgttgctgctgttgctgctgcccggactgattaaacggatttttcgcttcctgttgctgcaactgctgctgttgcatcatttcgccctgacggcacagcgcatccggctgcgtggtccagaccggcagcgaacgcataccaccgctgcagacgaagttgccgttgctgtccacgcccatatcaaccacgtcttccggcaccgtcagcaccagcggcgttggcgtctggttcgccagatagcgctggtaaatcgacatcgcgccgctggcaccgtacagtttggtcggctggttattgtcgcgccccacccaggtgatggtcacctgactaccgtcgatgccggcgaaccaggtatcgacgttattgttggtggtcccggttttccccgccagatgcaggcccggatacttcgcccccagctgacgccccgtaccgcgctgcaccacctgctgcatagtccacagcgtcatgtaggccgcctgggcaggcaccgcgcgctccgcctgcggatagctctggtagagcacagtgccatcttcggcaatcactgaccgcagcgcggaaagcggcgcacggttcccaccgctggcgatggtctggaaggcctgagccacttcaatcggcgtcaggttcagcgcgccaagcagcatcgacggcaccgcgttgagctgattcttcggcgcccccagtttagtccaggtatcgactaccgccggcaagcccagcgccatcccgaggttaaccgtcgggacgttcatcgagcgagtcagggcatcgaccagcatcacctgaccgctgaaacgacgatcgtcgttctgcggggaccacgtctgaccgttggacaggcgaatcgtcaccggcgcatcggcgatccaggtattcaggcgatactgattcggctggctcagcgcggtcagataggtcgccggcttggccagagaaccaatcgatcggcgggcctgcatcgcgcggttataaccggcgaactgcggctccgcgccgccgaccatcgcccgcacttcgccggtgaagcggtcaaccaccaccatggcggtttccaggtctgccagcttacgctgtttcttcagaaccgggatcccttcggaggccgctttttccgccgcatcctgcgccaccgagtcgaaagtggtgaagatcttcacgccggagagatctttcactttatcgcccagcttcgcctgcagttcctgacgaaccatctgcataaacgccggctgcggtgaaatcactccgccgcgcggctgcacgcccagcggacgggcgctgagcatgtcgtacagctcctggtcgataacttgctgctgctgcagcagacgcagcaccagattgcgtcgttcaagggccagtttcgggttacgccacgggttatagaccgacgcccctttcaccatccccaccagcagcgcctgctggtcgaggctcagctcttccaccggacggccgaagtaatacaggctggccagcgggaagccgcgaatttcgttatcgccgctctggccgaggtacacctcgttcatatacagctcaaggatgcgatccttgctgtagcgggcgtcgacgatcagcgccatatacgcttcgttggctttacgccagtaggagcgttcgctggagaggaacaggtttttcaccagctgttgggtcagggtactcgccccctgcaccgttcggcctgccgtcaggttcgccagcaccgcgcggccgatggagtagagactgatcccatcgtgctcatagaagtggcggtcttcggtcgccagcagggtatccaccagcagatcggggaagccgctgcgcttcacgaacaggcgctgctcgccgttcggcgactgcagcatggtgataagacgcggatcgaggcggaagaaaccgaactggcggttattatccatattctcgatggtctcaagatggtcgccgtcgaaagtaagacgcgcgcgcacctgcccttccttactgtccgggaaatcgaacggacgacggatcatctcgatgctgttagcctgcacggtatattcgccggggcgcgtcatcgcgctgacctggcgatactgcgtggcgttgagcagacgcaccatctcgtttttgctgatctgcatgtccggctcaaggttgaccatccggccatagaccgcggccggcagctcccagactttaccgtcaatgcggctgcggattttctggtcgaggtagacgccataggcggcaatcagcaccgcgaagacaatccccagcttgaccagcagccacagccagctgcgcttccgacgaggcttgccacctttgcctttggcttttctcggcaccggtttctcatcctcataatcatcgtcatcatactcatcgtcgtagtcctcttcccggacccggcgacgggtgactttctgtttagtcggacgtgagggtcttcccttacgtccgataggctcgcggtcatctcccgccatgctttttctccgcaacgttcaggcgcaaaggcctgattctcaatacttcccctgttcagaggaagaagaaatctctcaaattaacgtccaggctgcttatccttcggacgacaacctgctggcaggcaggacgcgccgccagcctttcagagggttggtttgcttcatgttacatgatactaacaataaaaattcaccataaaatcattgtgttaaacgcatcatcggcagaataagtcagaacatagcacgtaatgttcagggcatacaggatagcactaaaatgcgacattcttaaccagcattttacctcctgcgcacgtaacaagatgggaaagagtatgttttttaataacataaaaaacggcgcgcttcctgccggtcaacgcagtggcatcatccgcggatgaaaatatattttcccagcgccaacgtttattattgataaaagtaaagtcgattaagcgcctttccgttgataaaaatgagagcctgttaacatttatgcagaataatattttatgatgacaccagggaaatatttgttaaactagcggccagtgattcattattttgattactctatgatgcgtattccgcttatatttccgctttgcatggtagcccttctctctggctgccaacaaaaacctgcctcaacgctcagcccggccatcagcagccaggcgcagctcgagcagctctcgtccgtggcggccgggacgcgctatctcaagaataaatgtaatcgtagcgatctccccgctgatgaaacgatatatcgggcagcggtgaatatcggtaaagcgcgcggatggggaaatattgacgtggcgacgttaagccaaaatagcgaccggctttaccaacagctattacaggacagtaccccggaagccacacagtgcagtcaatttaatcgtcagctcgcgccatttattgccagcttgcgcagcgactaagcgaaatatcctcagcgcgccggttattgtgcgcgcttttattcctctttcggctcctcgtcaatttttccgcccggccagtcctccagcgccgcgagggtaaaggtcgtgccgttgaagctgaagatcgtcacatcctgctggatctgctccaccaccagattgggcaggggtgaatcgccctccgtccacgctttgccgtttaacacaatgctgcgcttttccggtagcgaggcatagacatgggcgctgtagcgtagaggcggcagcgtatcgctgtccacttccggcgccgcgggcgcgctggcttttgccgccggcggcggcgtctttggcgcggtctccccggcggcggttaacggcaaaagcgccgcatgagccaccggcagaggcagcgtttgcggcggtgacggatggcgccactgctcgccgccaaaccagccgagcgcgataaataatccggcgtacagcgggataatccagccggggatctgcaccatccgaccgcgactcaccggcgcgtctgcctgcgcggacggcggctgatgcgccaccagcggcgggatgcctctttcactatcatcacgaacaatcacaaccgtctcctgttccctcacggtgcagagaaggcgcccttacgggcgccccagactgctgacaaagtgcattcttcagagattgcccggcggcgctacgctagtgcgggccgacagataaatgcataactgtttgatattgcagtctttcgtaggccgggtaaggcgtaagccgccacccgacagaaaggcgagcacaataacgaaacaggtttgtcatcagccagaggcgcccttacgggcgccccacgttatgttatttactgctcaccggcaggccagcgccctgcgactcgccctgcggcaactcgagaacggcaaccgaccaggccggcagcgtgaccgagccgtcagcggcaacctgcacgccgctcgccagcgaacggtcgcctgccgcctgctggatggcgctcagctggagcgatgtgccggcgaagtcctgcagcgtccggctttccggtgcggcgttgatcgccaccacgatgccgtcgacacggctgtccagactggcgccagcctgcatcccatcatcgatggtcatcaccagcagacccgtctgctgatcggcgccggtgttgcggaagtccacgcgcttcatcaccgtcgcgccgtcaccgagggtaaacagcggagacgatttacgcagcgcggtcagctcctgataaaacgcggtcatctgcttgagctccgtttcacccggagtagccaccgcgtctttcacccgggcgataatgtcatagttgctgccatcatcgctgctgcgcggcataccgacgttgtagttgttgtcctgcagggagtagtccacgcggttaaaccagtcgccggaatcatacgaatcgcgggtaaaggatttagagcgcagcagctccgagccctgctggtcaaaggcgatcccctggccgagcatcaccgtcgccagcgacaccgcctgcatccggacgcgggtatcgagatccgcctcctgagcggctttatagctgatcatgtcccacagcgtctggttatcgtgttttgacacatagttcacgacttccgtcggatcagccgcatagccgcctggcgcgccgttatagtcaatctcgctgcctctcttcaccgcgccgtctttgtcgatcagcacaaagtccgcaaggttaccggccatgccgagacgggtcagatcggcgaggtgacgcgcctgatcgtcggtcagggtggtcagctcattcggcagaacgccggccccgctgcccacgccctggttctggcgtaatgcgtcaccggagtcgaacggcccgccgccgcgcacggcgtcgcgcagacgatcggagaacgtgccgatcccggtgcctttgagattgatttgcgaggcaatttcaaagcgatcgctctggttggaatcccagccttcgccaaagaagtagatatccgggttcagcgctttaatgcgttcccaggccgagaggatctgcgctttcgggtggtagcccatcaggtcgaagcggaagccatcgatcttataatcggtggtccataccgccagtgaatcggcgataagcttggcgaacatccggtgctctggcgccgagtcggagcaacaggtagccgattccacgctgccggtggtttcgttcagacgctggtagtaccaggggacgatcttatccagtaccgaggtgcgatcggtcgggccggcggcgttggtgtggttgtacaccacgtccataatgacgttcattcccagatcctgcttgatcgcctgaatcatggtgcggaactctttaatacgcgccgtgccttccggatcggtggcgtaggatccttccggtaccgtgtagtggaacggatcgtagccccagttataggagtcggtctgcgccaccagcgtattcaacgcctgcacctgcgggttatccttgctgtcgttctgcttcagctgggtcagcacctcttcgaccgtcgaaccgctgtcgcaatagcccgcgaactcgctgctcttcaccgcgctattgacctcgcacaggcggctgaacggctgctgaatatcggcgaccttgtcgctgaactcattgaccgtcgccagatcgaagaccggcagcagctcaatatgggtcacgcccgaggccgacagctgtttcagatgctggaccatattgctttcctgggcggtgagcgccagatacttaccgcgcagctccgcaggcacggtttgatcccaggcggagagatcgcgaatatgcgattcgtgaatcgtcattttcgccagatcggctttggttttctgcgcgtgcggcatcgtcagcccgtcccagccttccggcttcagcgcgctgtcgttgagatcgaccacctggctgtactccgagttggtcgacaaactgtgggcgtagggatcggtcacttcgtactgctcgactttacgcgactgcgggtggtagaccgtcatcgcgtagcggtagaaggcgcccttcaggtcgcttcccccctgccaggaccaggcgccggaggcgctatcgcgggtcatcgggtgactggctatcactttcttgtccgcgctatagatcaccagctcgacctgctgcgccgtgggcgcccagacgcggaaggtcacgccgctatcggttagctgggcgccatagctcagcgcctcggcggcggcggcataggtatcgtccagcacgccggcggtctgcacctgggtggctgagctcaggatcccatcgctttccgcggctatcgccaccgtctcgccctgcagcaattcatcgacgttaacatcatccggcagtttaaaggctggatagctggcgagatgcgggaagcgcatgcttacctgctggctgacggtggtgggggtcagcttgacatatttatcgctaaattcgccgttactgtcggcggccaccttactgctgtggctgtaatagaggcgcacaatgggtttattttccccacccggccacagcagagtagtcttatcgacccagtgcgcatcggccagcgccacgccaaaggcggcgcggaaggcgtcggcgcgggagtcatagaccgcgctgttgccggcgatgaccgataccgtccgatcggtgaaatcactgaaagagacgcgcaggtcgctgtcgataagcttattggtgccatcgcggacgataacgttgatgcatccgctctctttagtcagcgggatcacccaataagggccatatttgtcgctgccggtcggggtggtgctgacatcattccagtccgccaccggcgcgctcagcgcgtcacaggtttcgttgtcccataaatagaggtttttcgtcgcatagtcggccggcgtgctgctggtgatgccggcgatatcgacgagatgaatgacagcttgcctggcggaagcctgcaccgcttcgcctgggacggcaacgtccggtaagcggacgacgacatcctgcgggtcgggcgtgccgggagtgcctgggttgccaggattgcctggtgaacccggtgagccagaggtagaagaggaagagctgttatcacagccactcaataatactaacgatccaagaaatagggcatgacaggtatatctgagcattcgatagtccctaatatgcttattaaattataaaaggtaagaaaggatgaatatctttacagcgcgctaattagatatttttgctttcccaggcgcaatcatcccccacaaatgagcggggggcgtaggaagccgggggagtaaatcaataaagggaatgacgacccgaaaccgcaaactgattatgattcgccacgcttatcgccactctccggcaataaataattcaaaagccaataatcacctacctgtttcggtagggtattacgccaacgtgcagaaaaataaattagcaaaggaattaaaatgccagtttctgtgatgaggttaacaaatataaataaagggataattaaattattaccacaaattgtgacgctcatcatattaataaccgctatcccacagctggcgaaattaacctggcgcgtggtattccctgtgagtcctgaggatatttccgccctaccgttaaccatgcctccgccggcagatccggaattaaaaaatgtgcggcccgcatttaccctgtttggcctggcggtgaaaattagccccacgccaacggatgctgccagtctcaatcaggtgccggtttccagcctgaagctacgcctggccgggctactcgccagcagcaacccggcgcgctccatcgctattatcgaaaagggaaatcagcaggttagccttagcacgggcgatcctctcccagggtatgatgcgcggatcgccgccattctgcctgaccggatcatcgtcaactatcaggggcgcaaagaggccattttattatttaacgacagtcgcgcgccgtcgccgccgcccaccgccgcgggcaacccgcccctcgtgaagcgactccgcgaacagccgcaaaatatcctcacttatttatctatttcgccggtactcagcggcgacaaactgctgggttatcggctgaacccaggcaaagacgcctcgctgtttcgccagtccggcctgcaggcaaatgatttggcgattgccttaaacggcatcgatttacgcgaccaggagcaagcgcaacaggcgctgcaaaatctggccgacatgaccgaaataacgctaaccgttgagcgggaaggccaacgacacgatattgctttcgcgctgggggatgaataattgccaaccatgaaacgcctgcgaaaaatgctgcctgcgctgctgatattaaccccgctgctattttctccggccgccgcggaggaattttccgccagttttaaaggcaccgatatccaggaatttatcaataccgtcagcaaaaacctgaataaaacggtgattatcgatcccagcgtacgcggtactatcaccgtgcgcagttacgatatgctcaatgaagaacaatattatcaattcttcctcagcgtgctggatgtatatggcttcgccgtgatcaatatgaataacggcgtgctaaaagtggtccgcgccaaagacgccaagacctcggccgtgccggtcgccagcgcggccgcgccgggcgaaggcgatgaagtggtcacccgggtggtgcccctgaccaacgtcgccgcccgcgatctcgccccgctgctccgccagctgaacgataacgctggcgccggcagcgtggtccattatgagccctccaacgtactgctgatgaccggccgcgcggcggttatcaaacgcctgctgaccattgtcgagcgcgtcgacaacgccggggatcgcagcgtggtgaccgtgcccctttcctgggcctccgccgcggaagtagtcaaactggttaccgagcttaataaagataccagcaagtcggcgctgccgggctcgatggtggcgaacgtggtggccgatgagcgcaccaacgcggtactggtgagcggcgaaccaaactcgcgccagcgcattatcgccatgatcaaacagctcgaccgccagcaggcggtacagggtaacaccaaagtgatctacctgaagtacgccaaagccgccgatctggtggaagttctgaccgggatcagcagctcgctgcagagcgacaagcaaagcgccaggccagtggccgcgatcgacaaaaatattattatcaaagcccacggccagaccaacgccctgatcgtcaccgcggcgccagacgtgatgaacgatcttgagcgggtgatcgcccagctcgatatccgccgcccgcaggtgctggtggaggcgattattgccgaagtgcaggatgccgatggccttaatctcggtatccagtgggcaaacaaaaacgccggcatgacgcagttcaccaatagcggtttgccgatatcgacggctatcgccggcgccaaccagtacaacaaagacggtaccatcagcagctcgctggccagcgccctcggctcgtttaatggtatcgccgccggcttctatcaggggaactgggcgatgctgctcaccgccctctccagcagtaccaagaacgatattctggccacccccagcatcgtcaccctcgataacatgcaagccacttttaacgtcggccaggaagttccggtattaaccggctcgcaaaccacctcaggcgacaacatcttcaataccgtcgagcgcaaaaccgtcggcattaaactgaaggtgaaaccgcagattaacgaaggcgatgcggtgctgctggagattgagcaggaggtatcgagcgttgccgactcggcctccagcaccagcagcgatctcggggcgaccttcaatacccggacggtgaataacgccgtgctggtcggcagcggcgaaacggtggtggttggcgggctgctggataaaaccgtcaccgataccgctgacaaagtgccgctgctcggggatatcccggtgatcggcgccctgttccgctccgacagcaagaaagtgtcgaaacgcaacctgatgctgtttatccgcccgaccatcattcgcgatcgcgatgagtaccgccaggcttcttccggccagtacaccgccttcaacaatgcgcaaactaaacagcggggtaaagaaagcagcgaagcgtcgctcagcaacgacctgctgcacatctatccgcagcaggagacccaggccttccgccaggtcagcgccgccattgacgccttcaatctcggaggccgcccatgacgccagccgccgaacgccgtccgctgttgcccttcgcctgggcccgcgcgcaccatcttgtgctgctcagcgacggcgaatgctgcgaagcgctgtgccgccccgataccgccgcccgggcgctgctggaagcgcgccgcctggcggacgggccgatgcgcgtcagccgtctggcgccggacgcgttcgagaaagtgctggtgctcagctatcagcgtgattcggcggaggcgcaccgcatgatggccgacatcggcaacgagctcgacctctataccctcgccgaagagctgccggacaccgacgatctgctcgacagcgaggacgacgcgccgatcatccgcctgatcaacgccatgctcaccgaggccatcaaagagaaagcctcggatattcatatcgaaacctacgagcgccatctgcagatccgctttcgcgtcgacggcgtgctgcgcgaaattctgcgcccgcagcggcggctggccgccctgttaatttcgcgcatcaaggtgatggccagcctggacattgccgaaaagcgggtccctcaggatggccgcatggcgctgcgcatcggcgggcgagcaatcgacgtgcgcgtctccaccctgccctccagccacggcgaacgcgtcgtcctgcgtctgctggacaaaaacagcgtcaacctggatctgctgacgctgggcatgccgcccgccctgctcgatcgggtcgatgcgctgatcgcccgcccgcacggcatcatcctggtcaccggtccgaccggctccgggaaaagcacgacgctctacgccgccctcagccgcctcgacgcccgggagcgcaacatcatgaccattgaagatccggtggagtatgagctggagggcataggccagacccaggtcaacgccaaagtcgagatgaccttcgcccgcggcctgcgcgccatcctgcgccaggatccggacgtagtgctggtgggcgaaatccgcgatggcgaaaccgcccagatcgccgttcaggcctcgctgaccgggcacctggtgctgtcgaccctgcacaccaacagcgcgctgggcgccatttcccgtctacaggatatgggcgtggagccttttttactctccacctcgctgctggcggtgatgtcgcagcggctggtgcgccaactctgcccgcactgccgtcagccctggcaggcggatgccaacaccgcccggcagatggcggtcccggtcggcgcgcggctgtggcagcccaaaggctgtccggagtgtaatttcatcggctatcgcggacgcaccgggatccatgaactgctgctggttgacgaccgcgtgcgcgccgccatccaccgcggcgagaacgagatcaccctgatccagcagctggggccagcctggcaaaccctgcgccatgccggacgcgacaaagcgctggcggggatcaccagctgggaggaggtgatgcgggtcaccgaacagcaaacgacggaaagcgtctaagatggccctgtttcgctatcaggcgctggacgcgcagggcaaaacccgccgcggccttcagcaggccgactccgcccgccacgcccgccagctgctgcgggacaagggctggctggcgctggaagtgacaactgccgacccggcgcggcgactgtgggccggcggatcccttacccggcgtaccagcgccggtgatttagccctgctcacccgccagctggcgactctggttgccgccgggatcccgctggaaaaggcgctcgatgccgtcgcccagcagtgcgaaaagccgtcgctaagaacgttaatggccggggtgcgcagcaaagtgctcgaaggccactcgctggcggaggcgatgcgcggctatcccgcctgcttcgacgggctgttctgcgccatggtggcggccggcgaaacctccggccatctcgacggcgtactgaaccggcttgctgactataccgagcagcgccagcagctccgcgcccgcctgctgcaggcgatgatctaccccatcgtactgacgctggtcgctatcagcgtgatcgccattctgctctccaccgtagtcccgaaagtcgttgagcagtttgtccatcttaaacaggccctgcccttctctacccggctgctaatgagcctgagcgacatcgtgcgcagcgcgggcccctggctggcgctgctgtcgttactggcgctgctggcgctgcgctatctgctgcgccagcccgcccggcggctcgcctgggaccgggcgctgctgcgcctgccggtcatcggccgcgtggcccgcagcgtcaacagcgcgcgctacgcccgcaccttaagcattctcaatgccagcgcggtgccgctgctgctgtcgatgcgcatcagcgccgacgtcctcagcaacgcctgggcgcgcagccagctggcggcggccagcgaatcggtacgcgaaggcgtcagtctgcatcgggcgctggaatccaccgccctgtttccgccgatgatgcgctacatgatcgccagcggcgaacagagcggagaactgaccgccatgctggagcgcgcggcggagaaccaggaccgggagctgagcgcgcagatccagatggccctcagcctgtttgagcctctgctggtggtcaccatggccggcatggtgctgtttatcgtgctggccatcctgcagccgatcctgcaactgaacacccttatgagtatgtaactgtattaatggagaaaactatgcaacggcaacgcggtttcacgttactggaaattatggtggtgatcgtcattctcggcattctcgccagcctggtggtgcctaacctgatgggcaacaaggagaaagcggaccgccagaaagtcgtcagcgatctggtggcgctcgagggagcgctggacatgtataaactcgacaatagccgctaccccaacaccgaacagggactgcaggcgctggtgaccgctccggccgccgagccgcatgcccgcaactacccggaaggcggctatatccgccgtctgccgcaggacccgtgggggaatgagtatcagctgttaagcccgggtcagcatggcgccatcgacgtcttcagcgtcggcccggacgggatgcccgacaccaatgacgatatcggcaactggaccctcgggaagaaatagtgtctcagcgcggtttcaccctcctggagatgatgctggtcctgctgctgatcggcgtcagcgccagcatggtgctgctggcgtttccctccgcccgcacccaagaggccacacagatcctggcgcgctttcaggcgcaactggattttgtccgcgagcgcgggcagcaaaccggtcagctcttcggcattatcatccaccctgagcgctggcagtttatgcgcctgcagcctgccgacgatagcgccccggcggcggctgacgaccggtggggcaacgcgcagtggctgccgctgcaggccggacgcgtcaccacggcggaaaccctcccgcgggccaggctgacgctgcgctttcccgacggccaggcgtggacgccgggcgagcagcccgacgtgcttatttttcccggcggtgaagtcacgccgtttcagctgcgaattgacgccgcgacgggcataaacgtcgacgcccagggcgacagccagccgctggcggcgcgggagcagccatgaagcgtgaagccggaatgacgcttatcgaagtgatggtcgcgctggtgattttcgccctcgctggcctggcggtgatgcagtccaccctgcagcagacgcgccagctcgggcgtatggaagagaaaatcctcgccagctggctggcggataaccagctggtgcagctgcggctggagaaacgctggcctgccctcagctggtctgaaaccaccgtggaggccgccgggacgcgctggtttgtccgctggcagggagtggaaaccgcgctgccgcagctgcgggcgctggacgtggaggtccggcggcaaaaaagcgatcccgcgccgctggccaccctgcgcacctgggtgacgccgccatgataacgaaaatgcgcggtttcactctgatcgaaacgctgctggcgctggctattctcgccgtcctcagcgccgccgccgtgatggtgctgcagaacgtcatccgcgccgatggcctgacccgcgagaaaagccagcagatcgcggccctccagcgcgcctttcgccagatcgccgacgatgtcacccacatcattccccgtcgcgccagaaacagcgacacgtttttcttcgccggacgtttccagttgcagagcgacgactggggactggccttcagccgcagcggctggccaaacccgctggggatcctcccgcgctcggagatccagaacgtcagctaccgtctgcgccagcagcggcttgagcgtctgagcttcgatcagcaggatccgctgaccggcagccagccgacggtccgggtgctgctgcgcgaggtaaccgcgtttcgcctgcggttttacgccgacgggcgctggcaggaaacctgggaccgcccgcagacgctgccccaggggctggagatcaccctgacgctggcgaacagcggggagataacccgcctgtttttactcaccccgggaggcggccagtgataaatcggcaacgcggcgtcgcgctcctgatggtgctgttcatcctcgccctaatgatgatcctcgccagcgccatgaccgagcgcaccgcggtcatgtatcaacataccgccgtgaccctcgataatttgcaggccagatggtacgccctggcggcggaaaatatggccgccgcgctgctgcaacgcgatgcgctggactcgcccagtcaaacgaatctggcgcaaacctgggcgcaggaggggcgccgctttaccctcgacgatggcgaaatccgcgccacgatccgcgacgggcacgcctgcttcaacctcaatgctattgaccatcgcgcggatgaggctggcgacggaacgccctacccgaccgacgtcttcgttcggctgctggcgctgctcggcgagccgccgctgcgcgccagccagatcgccgccgcccttggcgactggacggacagcgacggccagccgcggctgaacggggcggaggacgaggtctatatggcgcaaaccccgggctatctcgccgccaaccagccgatgcaggatgtcagcgagttgcgcctgctggccgggatggacgccgcgctctatcagcgcctgctccccttcgtctgcgtccagccggatgacgcgctgcaggtcaatgtcaacaccctgcgcccctcccaggccgccctgctggtggccctctttcccggcgatctgacgctgcaggaggcgcaacagctgctgcacaaccgcccgcgaaccgggtggagcagcgtcgccgcctttctcgcgcagccgacgctgcagaaaaccgataccacgcttgcccgtccctggctgacggtgcacagcgcacgctttatcgccgcttttaccgtggtgactggcaatctccgctttcagctgcacagcgtcctgcaacaatcggggcgcacgtttaccgtcgtccagcggcgatatggactctctatggtggtcgatgaacaagattaatgcttctccccaggccatgctgatcgtgcgcctcgccgccgcgcaggcgccgctgcactggcaactcttcgcccccggcgagccgcaccacgaggccagcggccggtggccgactgacgacgccagccctttcccggcgctggctgagcagtacccggcctgggtgctgatcccggccagcgactgcgcgtttcactcgctcaccctaccggcgggcctgcgtaagccgccgctgcaggtggccccgtttctgctggaagagcagctggcagacgatgtggaagccacccattttgctctgctccaccgccagcaggcccagtgcgagatcgtcgccgtacagcggcaaaaaatgcgcgactggctggcgcgctgcgaatcgctctccttacagcccctggcgttgacgcccgacgtgctggccctgccctggcaaccgccggcgtggagcgcggtgcaggtggacgagcagtggctgatccgccaccagccgtggggcggcatggcggcggaaaacgtctggctgacggagctgctgcagagcgaggcggaagagcacgtcatcgacagctattcgccgccgcccgcggcgccgggcgtttggcgggagcagcctgcgcagacattgctgacacttgccgcacgccatccggcagcgcagaaactcagtctgctgcagggggagttcgccgaccggcggcggtctgcgcaggcgagctggcgtccggcgcggtatgccgcgctggccctggcgttactggcaggggcaaacagcgtgctggaccatcgcgatctggcgcgtcaggccgaggcggcgcaacaggccagccgggccttctatcaccgctggtttccgacggagaaaaaggtgattaacccacgactgcagatgcagcagcacctgcaaaccctcacccgtcaggcgcagcatgcccccctcgtcgaccgcctcagcgccttgcaaaacatcctcagcgaaacgccggggatccgtctgcgagcgctgagctgggatgccgcgggcaatcgtctgcagctggatatcgccgcggtctcttcccgggcgctggagcagtttacccagcgggcgcagccgcggtttcgcgtccggccgggcgacatgatcacgaaaccggatggcattgagggacaactgacgctggaggaaaacgatggctaatctgcttatctggtggcggcagcgcacgccgtcggagcagcgcctgttgcttggtctgacagggctgctggcggcatgcgccttctggtatgggctgtggcagccctggcgagcccgcgaggcgcagtggcggcaaaccctggtgaaagagcaggccagcctgcgctggatgacggagcaggctccgcgcctgcagcagctcagccagcagcccgcgccggcggcaaaagaggcgctcaccgcgctggtgatgcgcgaggcggcgagccacggactgacggtcatccgcctgcagccgcagggaaaacgtctgcagatcacccttcagccctgcgctttccaggcgctgatcgactggctggacgctccggcgatgcgcggcgtcaacgcgatctcgctgtccgtgaccgggcagccgtcgcgacccggctgggtcacggtcaaccatctgctgctggagcgcgacgatgaaggctaactggatcgcgggcggactgctgctggtcctctatctgttgtggctcaccgccacggctccggcgcgcctgctggcccccatgctgccgcccggcgtacaggtggggcagtttagcggcagcgtctggcgcggcgcggcgcaaccggtctactggcatggggaacggcttgaacgactggcgtggtcgctgaccctggcgggctggcaggtctctctcagcgatccccgcggcgtgatgggtcaggcccggctgtggggccttcgcgatctgcgcctacaggaggggcggctcaccgcccccgccagcctgctcagccgctggttgatgtcgactatgcccgtcaaggccgcgggggaggtcaccttcagcctgaccgaagggcggttcagcgacggacgctgccggcatatcatcgccggaggcgcgcagtggcggcaggcccgactgcactccccggtcggcagcctggagctggcccaggttaatggcaccttccgctgtacggtggacggcgccgtggcgctgactctccgtcaggactctcgtcagctgagcctcagcggccaggggactctgtcgcccgatggccgctatctgtttcgcggcacgctacagccccggcaggggatgccgccgctgctggcgctgctggtcacgcgcccgacagcgaataacgccccgggcccgacgccgtggcagctgcagggaaaatggttaccccaggagcaaaaatgacgacactagccgcgttatcgctgcactttccctttgtctggtatggctttctactgctgttcggcctggcgctgggcagcttttacaatgtggtgatctatcgtctgccgcgcatgttgacccagaccgcggacgacgagcggataaccctcagcaccccgggctcttcctgcccgcagtgccgccagccgatcgcctggcgggacaatatcccgctgctcagtttcctctggctgggccgtcgcgcccgctgctgtcaggcgcccatcgcgtggagctatccgctgaccgagctggccaccggcctgctgtttatcctcgccggagctttgctggcgccgggcctgccgctggcgggcggcctggtgctgctctcgttcctgctgatactggcgcggattgacgcccggacccagctgctgcccgatcgcctgactctgcccctgctgtgggccgggctgctgttcaatcttaacgaggtgtacattgccctgccggatgcggtcgccggggcgatggccggttatctggcgctgtggtcggtctactggctgttccgcctgctgaccgggaaagaggcgctgggctatggcgattttaagctgctggcggcgctgggcgcctggtgcggctggcaggttctgccgcaggtgctgttgctcgcttcggccagcgggctggtgtggaccctactgcaacgcctgtggacccggcagtcgctgcagcagccgctggccttcggcccctggctggcgctggccggcgggggtatttttctctggcagcagatgatctagcgtttgcgaaccgactggccgggcaggatgccgcccggcagcggcggctacgagtattttttgctgcggcgggtcggggcggcgttggccggatcgtccggccagacgtgcttcggatagcgtcccttcatctctttctgcacctcgcggtagctcccttgccagaaggcgctcagatcgcgggtgatctgcagcggacgctgggcaggcgacagaagctccagcaccagcggcacccgtccctcggcgatcaccggcgtcgtggcctcgccgaacatctcctgcatacgcaccgccagcgctggcgggttctccgcatggtatcggatcgccaggcggctgccggtcggcacggtatagtgcgtcggcagctcgcgatccagcttctggcgcagcggccatggcagccagtcctgtagcgcctgacgcagatccagcgccttcagcgcccgcagggaatgaacgccgttcatctgcggcagcagccatgcctccagcgaggccagcagcgaagcgtcatccactgcgggccatgcctcttccggcagccactgcgccgcacagtacagccgcaggcgcagctgctcagcctctggcgtccagttgagcaccccgaggcctttctcacgaataccgttgagcatcgcctgatgcagctctgcctcagagggcttcgccagcggctgggtcttgatcaccaactggccgatcaccgtccgccgccaggctttcagcgtaccctgcgcttcatcccactccaccgtgtcggaacttttcgccagttcagggcgggcggcgatcagctcgccgatttccactggcagagccaacagcatgcgggcatccggcgaagcgctgccctgcagcagcagcggagcgataagccattcatgacggcccagcgcgtcgtcggcgtccagcatcgcgcccatgccgttcgccagctggtagcgcccctcctgaccgcggcggcgggcgatgcgatcggcgaaggccgacgccagcagccccgccattagcccggcatcgggctggccgccgcggcgggccaggcgcttcatcagctgctgcgatcgctgctgccagttggcctgctgacgggaaaagacggcccccaaatccaccagtccgccgcgcggcggctcctcgaggatcgccgccagctttgccgctgtcgccgcctcgtcatcggtctgcgcggtggccagcatcgccgccagccgcggctcgttgccaagcgctgccattttgcggccaaacgccgacagccgctcgccgtccagcgccgacagcgcctccagcaggcggcgcgcggcggccagattgaccgcgggcggctgatccagccaggccagcgcggccggatcgtggcagccccactgcagcagctccagcaacagcgccgacagatcgctgtgcaggatctccggctcgctctgcgccgccgcccgttccgcctgttctttgccgagcaaatgcaggcagatccccggggagagacgaccggcgcgtccggcacgctgcgtcattgatgcctggctgatgcgctgcgtcaccagccgggtcaggccggtgcgcgggtcaaagcgggcgacccgctcctgggcgctgtcgaccaccaggcggatcccctcgatggtcaaactggtctcggcaatattggtggccagcaccactttgcgcttcccggccggcgccgggaggatcgctttgcgctgttcgcttaagggcaacgcgccatacagcgggcagagaatgacatcctccgccacgcgctccgtcagctgttccagaacgcgctggatctcgccgacgccgggcagaaacagcagcatcgatccctgttcatgccgcaggagctccgccgccgctaccgccacagcctcatcaaaacgctggtgcgcggagagcgggctgaagcgacgctccaccggataagcgcgcccctccgagaccaccaccggcgcctccggcagcagacgctgcaggcgatcgttatcgagggtcgccgacatgatcagcagcttgagatcgtcacgtaacccctgctggacgtcgagcagcagggccagggccagatccgcctgcaggctgcgctcgtgaaactcatcgaggatcaccagccccacgcccgtcagctccggatcgcgctggatcatgcgcgtcaggatcccctccgtaaccacctccaggcgggtctgcggtccgacgcaggtttcggcgcgcatgcggaaacccacggtctcccccggcttttcgccaagcagttcagccagccgctgcgcgacattacgcgccgccaggcgcctcggctcgagcaggataatgcgtcccgcgatgttgccctcggcgaggatctgcagcggcagccaggtcgacttcccggcgccggtcggcgcgttgagcaaaacctgcggcgcatgctgcagggcggataacagttctggaaggacagcggcaaccggcaatgaggacacaaaaggctccgggggttaacattcaggggttcgcattgtagcatccccctaattcattaccgagtctctatcatgtctgagccgaaaaggctgttttttgcgcttgaactgccgtctgccgtccagaagcagattgtccagtggcgggcaacgcacttccccgaagatgccggcaggcccgtcgcggcggataatcttcatctgacgctggcgtttctcggcgaggtgagcgcggaaaaacagcgggcgctggccgctctcgctggtcgcctgcgccagccgggctttaccctgacgctggacgatgccggacagtggctacgttcgcgagtggtgtggctcggaacccgccagccgccgcgcggcctgctgcagctcgccagcatgttgcgcgctcaggcggcgcgcagcggctgctatcagagcccgcagccgtttcacccgcatattaccctgtggcgcgatgctcgccaggcggtgccgatcccggcccccggctttcgctggacatttccggtgaacgagttcgtgctctatgagtccagctttagccgggggcgcacgcgctacacggcgctggaacgttatccgtttgataaggaaagttgatgcagtttgatccgccgttgcagcccgccattttgcttaaacgttacaaacgatttcttgctgacgtggtcacccccgatggccgcgagctgacgctccactgcccgaataccggggcgatgaccggctgcgccgccccgggcgacaccgtctggtattccacctcagacaatgcgaagcgcaaatatgcccacacctgggaattaactgaaacccagcagggcgcagttatttgcgtcaatacgctgcgcgcgaattctttggcgaaagaggcgatttccgccggaataattcctgaactttcaggctataaccagctgaaaagcgaagtgaaatatggcgaagagaatagccgtatcgatattatgttacaggcagatgaccgacaaaactgctatattgaagtgaaatcggttacgttggcggagaaagaatacggttattttcccgatgcggtgaccacgcgcggtcagaagcacctgcgggaactgatggccgtcgcggcaaatggcgaccgcgcggtgattttatttgccgtcctgcattcggcaattgaccgtttttctcccgcgcatcatattgatgccagatacgcacagctgttaacagaagcccaggacaagggggtggaaattctcgcctggaaagcggaactttctacgacgaggatgactctgaataagccgatcgccgtggtgttaaaccccggtaaataagtggctaaatagtgttcgggtcgcaagcgcgaatacgcttttcttcacagggttgtcaagtgtaacgtttagataattgctatccggaaaagcatctgctatttatagcggcctgattttcccccacatggggatcgatagtgcgtgttaaggagaagcaacatgcaagaagggcaaaaccgtaaaacatcgtccctgagtattctcgccatcgctggggtggagccgtaccaagagaaaccgggcgaagagtatatgaacgaagcccagctggcgcacttcaagcgtattcttgaagcatggcgtaatcaactcagggatgaagtggatcgcaccgtatcgcacatgcaggatgaagcagctaacttcccggacccggtagaccgtgccgcccaggaagaagagttcagcctggaactgcgtaaccgcgaccgcgaacgtaaactgatcaaaaagatcgagaaaacgctgaaaaaagttgaagacgaagacttcggctactgcgaatcctgcggcgtggagatcggcattcgccgtctggaagcgcgtccgacagcggatctgtgcattgactgcaaaaccctggcggaaattcgcgaaaaacagatggcgggctaatcccctgctgcctcactctctggcgggagtctctcccgcctggttctgttgtccgtaccatgactgactcacgctatatagggcgcttcgccccctccccctccggcgaactccacttcggctctctgatcgccgcgctcggcagctacctgcaagcccgcgcgaaccagggcatctggcgtgttcgtattgaagatatcgacccgccgcgcgaagtccccggtgccgccgataccatcctgcgccagcttgaccactacggtctgcactgggatggcgacgtgctgtggcagtcgcaacggcacgaagcctaccgcgaggcgctgacgtggctgggcgagcaagggctgagctattactgcacttgcacccgcgcgcggatccacgccgtgggcgggatctacgacggccactgccgcgacctcgggctgggggcggaaaacgccgcgctgcgcctgcgccaaacccgtccggtactgcagtttagcgaccgtctgcgcggcacgctcatcgccaatgagccgctggcgcgagaggattttattatccaccgtcgcgacgggctgttcgcctacaacctggcggtggtggtcgacgaccactttcaggggatcaccgagattgtccgcggcgcagacctgattgagccgacggtgcggcagatttcgctgtatcagcattttggctggcaggcgccggattacctccatctgccgctggctctcaatggcgacggcaataaactctctaaacaaaaccacgcgccggcgctgccggaaggcgatccgcgccccgaaatcgtccgggcgctccgctttctgaatcaggcgatccccgaggagtggcaggccctgagcatcgatgatttactcgcccaggccgtcgccaactggcagccggcgaaaatcgagcattctcaaatggctcccgctgagctatgattagccgctatttttacactgtacagttgatctgaagtccgtctgacactacgaggtgcaccatttttacccgagtcgctaatttttgccgtaaggtgctaagccgtgaggagcgcgaggcagaagccgccgtcgaaccaacgcctatgacggtgatcccgcgtgagcagcatgctatttcccgcaaagatatcagtgaaaacgccctcaaggtcatgtaccgcctcaacaaggcgggctacgaatcctggctggtcggcggcggcgtccgcgacctgctgcttggcaaaaagccaaaagattttgacgttaccaccaacgccacgccggatcaggtacgcaagctgttccgcaactgccgtctggttgggcgacgtttccgcctggcacatgtgatgttcgggccggaaatcattgaggtcgccaccttccgtggccatcacgaagggcataccaccgatcgcgtcacctcccagcggggccagaacggcatgctgctgcgcgacaacatcttcggctcgatcgaggaggatgcccagcgtcgcgacttcactatcaacagcctctattacagcgtggcggactttaccgttcgcgactacgtcggcggcatgaaggatctccaggacggcgtgatccgtctgatcggcaacccggaaacccgctatcgcgaggatccagtgcgcatgctgcgcgcggtgcgctttgccgccaagctcaatatgaccatcagcccggaaacggctgaaccgctgccgcgcctggccgccctgctccacgatgtgccgccagcgcgtctgttcgaagaagtgctcaagctgctgcaggccgggtatggctaccagacctacatgctgctgcgggaatacagcctgttccagccgctgttcccgaccatcacccgctactttaccgagcgcggcgacagcccgatggagcggatcatcagccaggtgctgaagaataccgatacccgcattcataacgatatgcgcgtcaatccggccttcctcttcgcggtgatgttttggtatccgctgctggagacggcgcaaaaaatcgctcaggagagcggcctggcgtactacgacgccttcgccctggcgatgaacgatgtgctggacgaagcctgccgtacgctggcgatccctaagcgcatcaccacccttattcgtgatatctggcagctgcagctgcgcatgtcccgtcgtcagggcaaacgcgcctggaagctgatggagcatccgaaattccgcgccgcctatgacctgctggagctacgcgccggcgccgagaacaaccacgaactgcagcgcctgaccaaatggtggggcgaattccaggtcgccgcgccgccggcgcaaaaagatatgctcaacgacctcggggacgatccggcgccgcgccgtcgtcaccgtcgtccgcgcaagcgcgcgccgcgccagggtagcgcatgactctggtctatatcgcacttggcagcaaccttgcttctccactggagcaggtacaggcggctatccgcgccctgggcgaaattccgcacagccgcgtggtcgccgtctcttcgttctaccgcacgccgccgctgggcccgcaggatcagccggactatctcaacgccgccgttgcgctggaaaccgccctgccccccgagacgctgctcgatcatactcagcgcatcgaactgcagcaggggcgggtgcgcaaagccgaacgctgggggccgcgcacgctggacctcgatatcatgctgtttggcgatgctgtcattaacagcgagcgcctgaccgttccgcactacgatatgaaaaaccgcggctttatgctctggccgctgttcgagatcgccccggaccttcactttcctgacggcctggcgctgcgcgccgtgctggataatctcggcgcggcaaagcccgccagctggtaatcccctctcccttttttagcatttgcggcgatcgtcgtaatcggttgcccaaaatcattgcccctctgaatgctgctgttagaatgccggttaatatgactttcatcatcaggaaatgttatgaaaccgaccaccattgccctgctgcagaaatgcaaacaggaaaagaagcgctttgccaccattaccgcctacgatcacagcttcgcgaagctgttcgccgatgaaggcataaatgtgctgctggtaggcgactcgctgggaatgacggtgcagggtcacgactccaccctgccggttaccgtggaagatatcgcctatcacacccgcgccgtccgccgcggcgcgccaaacagcctgctgcttgccgacctgccgttcatggcctatgccacccccgagcagacctttgcaaatgccgccatcgtgatgcgcgctggcgccaatatggtcaaactcgagggcggcgcctggctggccgacaccgtgaggatgctggcggagcgcgcggtgccggtttgcggccatcttggcctgacgccgcagtcggtgaacgtattcggtgggtataaagtgcagggtcgcggcgatgcggcgcagaccctgtttgaagacgcgttagcgctggaggcggcgggtgcgcagctgttggtcctggagtgcgtgccggttgaactggcgaagcgcatcaccgacgctctgaccattccagtgatcggcatcggcgcgggcaacgtcaccgacgggcaaatcctcgtgatgcatgacgctttcggcattaccggcggccacattcctaaatttgccaagaatttccttgccgaagcgggcgacatccgcgccgcggtgcggcagtatattgccgaagtcgaatccggagtctatccgggcgaagaacacagtttccattaaggagtcttgttgtgctgattattgaatccgtactgctgctgcggcagcatatccgccgtctgcgtcaggagggtaaacgtatcgcgttggtcccgacgatgggcaacctgcatgatggtcatatgaagctggttgatgaagccaaagccagtgcggacgtggtggtggtcagtattttcgtcaatccgatgcagtttgaccgcgtcgacgacctggcgcgctacccgcgcaccttacaggatgattgcgaaaagctgaacaaacgtcatgtcgactttgtcttcgcgccgacgccggcggaagtgtacccccagggtactgaaggccagacctacgtcgacgttccgggattatccaccatgctcgaaggcgccagccgcccgggccatttccgcggcgtgtcgaccatcgtcagtaagctgttcaaccttgttcaaccagacgtcgcctgcttcggcgagaaagacttccagcagttggcgctgatccgcaagatggtcgccgacatgggctacgacattgagatcatcggcgtgccgatcgtccgcgcgaaagatggcctggcgctgagttcgcgtaacggctacctgaccgccgaccagcgcaaaatcgcgcctggtctgtataaagtgctgagcgcggtggcggaaaagctggccgccggcgatcggcagctcgatgagatcatcgctatcgctgaacaggagctgaatgagaaaggcttccgcgccgacgacattcagatccgcgatgccgacaccctgcttgagctgaccgatgccagccagcgcgcggtgatcctgatggccgcctggctggggcaggctcgcctgatcgacaaccggatcgtcacgctcgctcagtagacagcgggtaaaaatcgggcaatactgcccgggcttttctcagggcgggcgccgtgtccgctctgctacattaaggttgaagggtagaagttatgatgcgtaatatgctgcagggcaagctccaccgcgtaaaagtcacgcaggcggacctgcactatgaaggttcttgcgccattgaccaggacttcctggatgcggccggtattctggagaatgaaactattcacctctggaacgtcaccaacggcaaccgtttctccacctacgccattgccgccgagcggggctcccggatcatctccgttaacggcgccgccgcgcactgcgccagcgtcggcgatattttgatcatcgccagcttcgttaccatgtcggacgaagaggcgcgcagctggcagcctaacatcgcctacttcgaaggcgacaacgaaatgaagcgccaggcgaaagctattccggtacaggtcgcctgatggccgcgacgctgcgctcaggcgcagcgtcggtattacccctgcggctggttactgatcagccgcgacatcgtctccagcgaatccgtgcgtaagatatataaccgctttaacagaaacggattgtcccccggcttcaccttcccacgcaccgtcgttaccgccatatgaaacccggcgtcattcgccgcctgcaccgccgtagcgttatagccgccgaagggataggaaaggtagagaacgtgcggattaaactggctcagcgcccggcgcgagcgggcgaaatcaaacagaatattatggtaattgcgactgaataaaatcggccgccggccggcgtcaacccgatgcaggaagtgagtatgcgactgaatatcaaagacgtcctggatctggcgtagctcggaaatgctcataaactgcagggatttcggatcccacttctgtggatggcgcttaatacgcgaggagataataaacgcggtggcatggaaaccgtactgtttcagcaccggataggcgtagcggttcaccgatttcaagccatcatcgaaagtgatcgccaccgcccgcgccgggagattgattttattacgcacatagccttccagctgatacagggtcagcgtggtatagccctgatcgcgcagccaggtcatctgattcgtgaaggcgcgaaccgaggtggtggtcgacgtatgacgaaaacgggtgttctcttcatcgcgcagaatatggtgataggtcagcacgggaataccgtgatcctcctgcgcgtccagactactgacccacgccagccggtcgccaatgcggatctgaaaccaggtctgattgagccggtccttcagcttgctgaggatcggatagcgcagattgttggccagcgtgccgaacggcgcgctgcttaccgagggagcgtcatagagcggtgtatctttccaggtgagtaaattttggttactcagcggtttattaagatcccccaaacggtcctccacccgctgcttgccctgcaccggctcgagatgccctttatcaataaacccggtgccaaagccgaaacgaaactcatagtagtcagccgccgtcgggacgactgcgaggatctgcccggcacgaacattgccgacgctgaccacatggtttcccacctgcgcccagatgaccgcgtcttcggtggtttgcatatagcgcacagccttgccctgctggctaagcaggctggcggaggcgctgagtgaggtcaggaaaagaagcagggtcaaaaatcgggcaagcatacgcatcaaaccgttataccatcaacggcggttattgtaacaaaagcggtatctgtcccgctgcttaatttccccaggcatcatggcgcaaccggaacggggggttcttctgctgctgatgccacaggctgctcaccatcggcccgcccgcgctgacgatcgcctggcgaaacgccacgctgcttaacgtgcctcgcaggagatacattcgctcaaggagtggatagctgacgccggagatcacttcgcagtgggtatgtttgtggctcatcagcgccgcggcccgataaggcgccgcaccggttttgtcagtgagaaaaatgaccccgtccccggagtcggtggcatgcagcgcatcgcacatcatccggctcaacatattgctgctgagattgcgccagtaattgaccgcccggcactgggccagcggaccaaacttttgttcaagacgatccagcatctcctgcgccagctcatcgtgacaggtaatgacccatccgagcatgcttccctccttagccagcgaataatgtagcaaggtgaagatgacgtatcggtgatgggagtcaaagataagcggttagcgcttcgcatatttacttcaggaagcgctaaccatgatgagtatcagctacgcaggccgcgaccgcgctgaattaacgaccagcacagcagatagaaggcgacaatgaacaccaccagcacggcgaaggtggtcgccagcgggacgtcgttgataccgaggaagccgaagcgaaaaccgctgatcatgtagacgatggggttcagatgcgacagcccctgccagaacggcggcagcagggtcagcgagtagaacaccccgccgagataggtcagcggcgtcagcacaaaggtcgggatcaggctaatgtcatcgaaggtcttggcaaacaccgcgttcagcagcccggccagcgagaacagcaccgcggtgaggagcagcgtcagggcgacaaacagccaggagtgaacctggaacggcacaaagaatagcgacaccgcagtcaccaggatacctacgcacagtcctcgcgctaccccgccgcccacgtagccggcgataatcacatgcgtcggcactggcgccaccagcagctcttcaatattgcgctgaaacttggcgctgaagaaggatgaggcgacgttggcgtaagcattagtgatcaccgccatcatgatcaggcctgggacgataaactgcatataggtaaaaccatgcatctcaccaatgcgcgagccgatcaggttgccaaagatcacgaaatacagggtcatggtgatcaccggcggcaccagcgtctgtacccagatgcgcataaaacggtggatctctttggtccagatgcttttcagcgcgacccaataaagctgcatcatgctgattctccttttcgctcatgcaccagcgtgacaaacagctcttccagacggttggctttgttacgcatactcagtacctgcaccccctgggcgctcagctgcgcgaagacgctgttaattccctgctcacgcagaacctccacttccagcgtcgaggtatcgaccagctggtactggtagccttcgagcttcggcaccgggctttttggcgcgaggtcaagaataaaggtctctgacttcagcttcgacagcagcgctttcatcgaggtgttttccaccagctcgccgtgctggatgatgccgatgttgcgacatagcatttcggcctcttcgagatagtgggtggtcaggataatggtggttccgcgatcgttgagatccttgagaaagccccacatcgagcgacgcagttcaatatcgacgccggcggtcggttcgtcgaggatcagcagcttcggctcatgcatcaacgcgcgggcgatcatcagacggcgcttcatcccgccggagagcatccgcgcgcgttcgttgcgtttttcccacaggtcgagctgttttaaatacttttcactgcgggaaagggcttctttacgctcaacgccgtagtagcccgcctggttaacgacgatctgctgcacggtttcgaacgggttgaagttaaactcctgcggcaccaggccaagctggcgcttggcattgacgacgtctttctccagatcgtagccaaagacattgacctgaccagaggttttgttcaccagcgagctgatgatgccgatggtcgtggattttccggccccgttcgggcccagcagggcataaaaatcccccgcttcgacctgcaggtcgatcccccgcagcgcctgaaccccgccgggataggtttttttgagctgttttaattccagagcaatggtcattaaatatctcttctcgtgtcgtgacacgtcattaacccgcctgactcacgtttgcgctggaccggcgctgacgccgccaacgcatctgcagcctgaagtatcacgggttaagatggttttaaaaaaggtgagcttaccctatattagcgcaacgcacttacttggttacaggccgataacgtccatgaatgatatagatacactcatcagcaacaatgcactatggtcaaaaatgctggtggaagaggaccccggcttttttgagaaactgtcgcagacgcagaaaccgcgcttcctgtggattggctgttcggacagccgcgttcccgctgagcgactcaccggcctggagcctggcgaactgttcgtgcatcgtaacgtagcgaacctggtgatccacaccgatctcaattgtctgtcggtggtgcagtatgccgtcgatgtcctggaagtcgagcatattattatctgcggccactacggctgcggcggcgtgcaggcggcggtggagaacccggagctggggcttatcgacaactggctgctgcatatccgcgatatctggtttaagcacagctcgctgctcggtgaaatgccagaggagcgccgtctggataccctttgtgaactgaacgtgatggaacaggtgtacaatctgggacattcgacgattatgcaatccgcgtggaagcgcggacagaaggtgaccatccacggctgggcttacgggattcacgacggactgctgcgcgatctggatgtcaccgctgtgagcagggaaaccctcgaacagcgctatcgccacgggatctccaacctcaagatcaagcacatcaaccacagatagccttcagacttcgccaccctggagagcgcggcgcgcgctgtccagagtgggatatccccttactcgtccagcagggtgactttgccgatatacggcagatggcggtagcgctgagcatagtcgataccgtagcccaccacgaactcatccggaatcgcgaaaccgacgtattcaaccgggacgttcacttcgcggcggctgggtttatcaagtagcgtacaaatggccagcgatttcggctcgcgcaggctgaggatttcgcgaactttagacagggtattgccggagtcgatgatgtcttccacgatcagaacgtctttaccacggatgtcttcatccagatctttaaggattttcacatcacgagtggtggacatgccgctgccgtagctggaggcggtcataaaatcgacttcatgcggcacctgcacttcacggcacaggtcggccatgaacataaacgagccgcgcagcagccccaccagcaccatttcgctgccgctgttctgataatgttcgttgatttgacgacccagttccgcgatacgcgctttgatctcggattccgggatcatcacttctacagtatgtttcataatactaaccatttgattctaaatataaatcatcaaagccgctgctttcgccccgacgatgaccggcaagccatccagtataccagcaaaaagaaatcttcggtgcagggattaataaagccatatttgtgattccgatcacacttgttaaatcctataattaattgcagttaaaaaatttaacaaacacatgagtaactttttatggctgaaacaaagtctcaacaatcaaggctcctggtgacgctgactgcgctatttgcagcgttctgcggcctctatctattaatcggcggggcatggctggtcgtgcttggcggctcctggtactaccctatcgccgggctggtgatgctgggcgtgaccgtaatgctgttccgcggcaagcgcgctgcgctgtggctgtacgccgcgctgctgctggcgaccatgatctggggcgtctgggaagttggtttcgacttctgggcgttgacgccgcgtagcgatatcctcgtcttctttggcatctggctgatcctgccctttgtctggcgtcgtctgccggtgccttccgctggcgccgttggcgcgctggtcgtcgccctgctgatcagcggcggcatgctgacctgggctggttttaacgacccgcaggaagtcaacggcaccctgagcgccgacgctacgccggccgcaccgatttccaccgtcgccgacggcgactggccggcctatggccgtaaccaggaaggccagcgcttctccccgctgaagcagattaacgccgataacgtgaagaacctgaaggaagcctgggtgttccgcaccggcgacctgaaacagccgaacgatccgggtgaaatcactaacgaagtgacgccgattaaagtcggcgatacgctcttcctgtgtaccgctcaccagcgcctgtttgcgctggacgccgccaccggtaaagagaagtggcattttgacccgcagctgaacgccgatccgtcgttccagcacgtcacctgccgcggtgtttcttatcacgaagcgaaagcggataacgcccctgccgacgttgtcgccgactgtccgcgccgcattatcctgccggtgaacgatggtcgcctgttcgcggtaaacgccgacaacggtaagctgtgcgaaacctttgctaataaaggtattctcaatctgcagaccaacatgccggtcaccacgccgggcatgtatgaacccacttcaccgccgatcatcaccgataaaaccatcgtgattgccggcgcggtcaccgataacttctctacccgcgagccgtcaggcgtgatccgcggctttgatgtgaataccggtaaactgctgtgggccttcgatccgggtgcgaaagatccgaacgccatcccgagcgatgaacatcacttcacgctcaactcgccgaactcatgggcgcctgccgcctacgacgctaagctggatctggtctatctgccgatgggcgtgaccactccggacatctggggcggcaaccgtacgccggagcaagagcgttatgccagctcgattgtggcactgaacgccaccaccggtaagctggcctggagctatcagaccgtccatcacgatctgtgggatatggacatgccttcccagccgacgctggctgatattgaggtcaacggcaaaaccgtaccggtcatctatgccccagcgaaaaccggcaacatcttcgtgctggatcgtcgtaacggcgagctggtggtcccggcgcctgaaaaaccggttccgcagggcgctgccaaaggtgattacgttaccaaaacccagcccttctccgatctgagcttccgtccgaagaaagatctgaccggcgcggacatgtggggcgccactatgttcgaccagctggtgtgccgcgtgatcttccaccagctgcgctatgaaggtatcttcaccccgccgtctgagcagggcacgctggtgttcccgggtaacctggggatgtttgaatggggcggtatctccgtcgatccgaaccgtcaggtggctatcgccaacccgatggcgctgcctttcgtctcaaaactgatcccgcgcgggccaggcaatccgatggagccgccgaaagatgcgaaaggctctggtacggagtccggcgtgcagccgcagtacggcgtcccgtacggcgtaacgctgaacccgttcctgtcgccgttcggcctgccgtgcaaacagccggcctgggggtatatctccgccctggatctgaaaaccaacgaagtggtatggaaaaaacgtatcggtactccgcaggacagcctgccgttcccgatgccggttaaactgccgtttaccatggggatgccgatgctgggcggtccgatttccacggccggtaacgtcctgttcatcggcgcgactgcagataactacctgcgcgcgtacaatatgagcaacggcgagaagctgtgggaagcccgtctgccagccggcggtcaggcgactccgatgacctacgaagtgaatggcaaacagtatgttgtcatctctgccggcggtcacggctcgttcggtaccaaaatgggcgattatattgtcgcctatgcgctcccggatgacgccaaataaaacgcaaaacggcaacgaaagttgccgttttttttggtgttccgtccttcttcccgtaggggatggcagcaggtcgcagagacttaaaccgtgaaccccaacatcatcccggtgtcttcatgttccagcaggtggcagtgggccatataggcaaactccttcggcgccggatgatcaaacttcactaatacttcactcacgttcccttccacacgaacggtgtctttccagccgcgacgatgcgccgctggcggcttgccgttttcgctgaggatacggaactgggtgccgtggatatggaacggatgcaacatcatgtcgcccttaccagaaatcacccagcgctcatactggcctctggcggcggcaaacatcggctcattcatgtcgaaggctttgccgttgatgcggttggcgttatggaaatcaaagcccttgcctgacgacatgccatgctccatgccggatccgtggttcatgttactcattttgctcatgtcgccgtgatgcatattccccatgtcgctcatgtcgccatgccccatcatgccgtgatccattccggccatcgcctggtcgccatacttctccatcagcgcctgcatgcccatccggtcgagcatcggatccatagacagctggagctgacgctgcgtcagccccgtcagggacggtaacgccgggagagcggccagagtatccagcagcttgccggaggcgggaatgaccagcggctggacgcgcagtaccggctgtggtttatcaaaaggcgcaatcgccatgcccatctggctcaccggcagggtcaccagatcgaaaggtttaccgtcgctggtgtccaccagcacctcaaagcgttcacccatcaagaccggcaattcatcgaccttgaccggctcggccaacagaccgccatcgctggccaccacgtacagcgggcgcttatcgctggtggcaaaattgagggaacgggcattacagccgttcagcaagcgcaggcgcagccagccgcgcggcgcggcatgttcgggatagagggccccattggtcagtagcgtatcgccaaaccagccgacggcggcgctcatcacatccagctgatagtcgatctcgccggcggcggtgaacttcttatcctggacgatcaccggcacatcatcgattccccactgcttaggcagcagcaggcgcccgctctcttcatcctcgatcagcaccaggccggccagccccatcgccacctgccggccggtgctcccatgctgatgcggatgaaaccagcaggtcgccgcccgctgcgttggcgtgaagcttaccgtgcgggtggcacccggcgcgataaccccctgtggccccccgtcgacctcgcccggtacctccagaccatgccagtgcagcgtggtctcttccgccagctggttagtaatatccaccgtgacggtcttcccctgcgtcaactgcagcgcagggcccagcagcgacccgttgtagccccaggtagtggcattcagggcgccaaaccgcgttttgcccgcctggatcctgagcgcgatgcggttgcgcgcatcggcggctaacagcgacggtatcggcagagccgggcgactggcggcaaagaccgcccggctccataacggcaatgcgctggccatgccgaccgcggcggtcagtttgaggaagtctcgacgttgcatattcacatccttttattctgcgggcgaatatttgagcttaaaccctaccgtaacgggaaggtcaagcagaagagtaagaataaagatcggcgctgtgtaaagaagtatgctaatttgaagcgtcggtgatctaatggtagaaaaaatgaagacgcttttcagaacaatggtactcggcagcctgcttgctctctccgccaacagctacgcgctcagcgaatccgaagcggaagatatggctgatttaaccgcggtttttgtgtttctgaaaaacgactgtggctaccagaacctgcccaacacgcagatccgtcgcgcgctggtgttctttgcccaacagaaccagtgggacctgagcaactatgacagctacaacatgaaagcgctaggcgaagacagctatcgcgatcttagcggcattaacattccgacggcgaaaaaatgtaaagcgctggcccgcgattcgctcagcctgctggcttacgttaaataattccctgcgcgggcggcaacgctccgcgcctttagcatttcaatttccccctttaaatatttatatttattattgtatataaacaaaccttatttaattgcgaacctatcaatttgccaaataaagtaaacccataataatgaagaatgactaaaaaactaataaaatatcattattcatatattgcaaaataaaaagcacccttctagaatccggtaaaaatatacctacttcatggactgaaattgtgaatatctcgctgactcttcgtgttatcccactcgccgcgctgttagtagccggctgtagcaatacctcttcccgccagccggttaaaccgatcgccacgccgctgacgtcacagcagcaggcagagcaggagcgggcggccagcgaacaagcgcgcattgaatcctgtcgccaggcgttggattcgctaaaagaggttaacccacagcaagccactaaactcagcaatgactttaacgctttagtgcgcgcggcgtcacaatacaatagcgtgcgcgagaaagtggcggatcctacccggcttggcattgactccatgtatcagtttaaatccatcaaactgtgcgccgatatccagaaaacgctgatcgatagcctggtacagcgtggtgaaagcaaacaaccatgaacagagccgccacgctgaccctcaacgcgcccctgctgatgctcgtcgctgcgctggcgctttcaacccccttcaccgccggcgccgcgccggcctttcttgattacgcccaacagcaaacccagcaatctcaggcgcaagaaaaaaacgatgccgcaagcgcaaaacaaacacaagaaagccgccagagcgcagataataaaaaaaccggtaccaacacctcacaattacaaaaaagaatcaccagccagcaggcggcgattgcacaaaaagataagcttatacagcaattaaaaaaacagcttgccgctacgccgcaaacggatactgccggagcgaatgagcaagcggcgttgaataagagaattaatgaattacaggtcgccttaagcgccgctactgcagaaaaagaggcattaataaaaaaagcaggcgttgtgcagaataataatctacagcaaagcaaggccgcggcgcgtcagcagatccagcaattaacgacgcagattcagcaagccgaagctgaaaataaacgcctcagcgccagctttaccacgcttaataaagataaacacgcgctaatgacccaactggccgcaacggaaaaagagaaacaggccgtcctcgagcaggttaaggcccttaacgccgataagcagtcgctgactattcgcctcgccgctgcggagaaggcgcagcaggccgctcttgaccaggctaaagcgcttaacactgacaaacagccgctggctacccgactggccgccgcggaaaaagagaaacaggccgtcctcgagcaggttaaggcccttagcgccgataagcagtcgctgactattcgcctcgccgctgcggagaaggcgcagcaggccgctcttgaccaggctaaagcgcttaacgctgacaaacagccgctggcgacccggctggccgccgcggaaaaagagaaacaggccgtcctcgagcaggttaaggcccttaacgccgataagcagtcgctgactattcgcctcgccgctgcggagaaggcacagcaggccgctcttgaccaggctaaagcgcttaacgctgacaaacagccgctggcgacccggctggccgccgcggaaaaagagaaacaggccgtcctcgagcaggttaaggcccttaacgccgataaacagtcgctgactattcgcctcgccgctgcggaaaagacgcagcaggctgccctcgatcaggtcaaagcccttaacgccgataaacaatcgctgtccacccggctggccgccgcggataaagcgccgcatggccccgctaacgacgccgctgcgccaaaaaatgagccaccagagatggcggccatagtggcagcctatcgcctgcaggcggataaagacaacgcccagctacggatgaaagaagatgaaatcgaactgctgagaacgcagctttctgtacagtccaaaacgcgcagcggcgagagcgccgctgccaaactcagcgcatcgggagaacagcaggcttatgcgatcggcgcctcgatgggaagcgaggcgctcaacgtccttaccacccgtcgcactcagggagttaccgtcgacgcaggcctggtgctgcagggcatcgaagatgcctttcgcggccagcttcgtctcggagagcaggaacgtaacaaggcgctgtttgatgtgtcgcagcaggtttttcagaacctgaataaaatagagcagaaaaacatcagtgccggcaagaaatatcagcaggcatttgcgcgcaaaaaagatgtggtctttaaagagggcgtctacagccgcatcgattacccgggtaaaggaaaaataagcggtaacgacctggttaccgtggtgatcaaagagatgctgacggacgggacggtgatcaacgatatggaagcgaaagatcaggcgcttacgcaaaagctggatgcctatcccccggtgtttcgcgaaccgctgaagcgtctacagaaccacggctccgtgacgctcgtcgtcccgcctgaaaaggcctatggcagtaaaggattaccgccaaaaatcccgccaggcgccaccatggtttattccgtgcggatagtagatagccaacccgagccggcaaaatagcctcatcctctccaccgcccttccggggcggtggctgttattcctgcctcattgctgcaataaccgccgtgcatcctcatctatagttgtctatgatgttgcactcgttttacgggtgtaacagatgttaacgaaggaggagccttatcgtggccgataatccactgtggcatgaaacgctgcatgaccattttggtcagtattttagcgttgataacgtgctgtaccacgaaaaaaccgatcatcaggatctgatcatctttgataaccgcgcctttggccgggtgatggcgctggatggcgtcgtacaaaccaccgaacgcgacgagttcatctatcacgaaatgatgacccatgtgccgctgctggctcacggcaacgcgaagcatgtgttaatcattggcggcggcgatggcgcgatgctgcgcgaagtctctcgtcaccgtagcatcgaaaccatcaccatggtggaaatcgacgccggggtagtttcattctgccgccagtacctgccgaaccataacgccggcgcctatgacgatccgcgctttacgctggtgattgatgatggcgtcaattttgttaatcagacgacgcaaacgtttgacgtgatcatttcggactgtaccgaccctatcggcccgggagaaagcctgttcacctcggctttttatgaaggctgcaaacgctgcctgaacccgggtgggatctttgttgcccagaatggcgtcagcttcctgcaacaggatgaagcggtaggcagccatcgcaagctaagccactattttcgcgacgtcagcttctaccaggcggcaattccaacctattacggcgggatcatgacctttgcctgggcgagcgacaatgaggcgctgcgccatctctccagcgaaatcattcaggcgcgctttcacaaagccaacctgacctgccgttactacaatccggcaatccatacggcggccttcgccttaccacaatatctgcatgatgctctgtccgcaccgtgacgcgaaataagggggtgaactaaattgaaaaaattgaagctgcacggctttaacaacctgaccaaaagcctgagtttttgtatctacgatatctgttacgccaaaacggcagaagagcgcgacggctacatcgcctatatcgacgaactctataatgccaatcgcctgacggagatcctgacagaaacctgttctattattggcgccaatatcctgaatatcgcccgtcaggattatgaaccccagggcgccagcgtgaccattctggtcagcgaagagcctgtcgatcccaagctgattgaccagaccgaacatcctggcccgctaccggaaaccgtggtcgcccatctcgataagagccatatctgcgtgcatacctacccggagagccatccggagggcggcctgtgcaccttccgcgccgatatcgaagtttcaacgtgcggcgtcatttccccgcttaaagcgctgaactatctgattcaccagctggaatcggacattgtgaccattgactaccgcgtgcgcggctttacccgcgatatcaatgggatgaagcattttatcgatcatgaaatcaattcgattcagaactttatgtccgacgatatgaagtcgttgtatgacatggtcgacgtcaacgtttatcaggaaaatatcttccataccaaaatgttgctcaaggagtttgaccttaagcactacatgttccatacccgaccggaagagttgactgccgaagagcgcaaggtcattaccgacctgctatggaaagagatgcgcgagatttactacggccgcaatattcctgccgtgtaatctatgaaatgcccggcggcgcttttgcttgccgggcctgtagttctgcgccacccgacataaaaggcgtcattaacgctgctgcataaactcacgataggcggcgaccacctgcaggaaatcctcaacaccgcacagagagagactttcttcgtcgtagtagctcatcccctcctcgatttcgtcgccggaaaactccagctgattggcgcggatcatcacctcttcgccatccagccacagcgtatattcatgcccggcacgctgccaggaacgctcgctgcccttcacggtgcgcgcagcctgctccacttcgtccagcagagcaagattgcctttcacctcctcgttgaaccagtggccgatcgcctcgtgatccatcgacattcgcacctttaccactccggtaatatcgcgcagaaattcgtaatccatagtcttttcctctgcaagggcaatgcgtcaccgctgcactgtacccatgcagtaattatcgcagcagacagaaagaaaaaaagcgtagcgggcgggaggtttggaaataaaaatgcccggtgatgcaatgttcaccgggcattggagagtttatcgccaaacggtcagccgggctgaccgaatggtttacaccgcggtctggaagatcacgccgtcagctttttcagtgtactgatccagctggttgaagttcagataacggtaggtatcttccgccgtcttatccacctgcgccacgaaggtctggtactcttccggcgtcggcagtttgccgagcagcgaagccaccgctgccagttcggcagaggccagatagacgttagcgccggtacctaaacggttcgggaagttacgggtagaggtggaaaccaccgtcgcgccgtcggccacgcgcgcctggttacccatacacagagaacagccagggatttcgatacgcgccccgctcttaccaaacacgctatagtagccttcttcggtcagctgcgcggcatccatacgggttggcggcgccacccacaggcgagtcggcagttggcctttgtggctgtccagcagcttaccggcggcacggaagtggccgatgttggtcatgcaggagccgatgaacacttcgtcgatcttctcgccctgcacatcagacagcaggcgggcatcgtccggatcgttcggcgcgcacagaatcggctctttaatatccgccagatcgatgtcgatcactgccgcgtattccgcgtcagcatcggcttccagcagctgcggatccgccagccatttttccatgccctggatacgacgctccagggtacggcggtcgccgtagccttcggcgatcatccacttcagcagaacgatgttggagttcagatactcaacgatcggctctttattcagtttgatggtgcagccggcggcagaacgctcagccgaggcatcggtcaactcgaacgcctgctcgactttcagatccggcagaccttcgatctcgaggatgcgaccagagaagatgtttttcttacctttcttctccacggtcagcaggccctgcttgatggcgtacagcgggatggcgtggaccaggtcacgcagggtgatccccggctgcattttacctttgaaacgcaccagcaccgattccggcatatccggcggcatcacgccggtcgcggcggcgaaggccaccagaccagagcccgccgggaaggagatgccgattgggaaacgggtgtgggagtcaccgccggtacccacggtatccggcagcagcatgcggttcagccaggagtgaatcacgccatcgcccggacgcagagaaacaccgccgcggttcatgatgaagtccggcagagtgtggtgcgtggtaacgtcaaccggcttcgggtaggccgcggtgtggcagaaggactgcatcaccaggtctgcagagaagcccaggcacgccaggtctttcagctcatcacgggtcattggaccggtggtgtcctgagaaccgacggaggtcattttcggttcgcaataagcgcccggacggataccggcaacgccgcaggcgcggccaaccattttctgcgccagcgagaagccgcgggtgctttccgccacgtctttcgcctgacggaagacatcgctgtgcggcaggcccagcgcttcacgcgctttggtggtcagaccgcgaccgatgatcagcggaatacggccgccggcgcgcacttcgtcgatcagcacatcggttttcagctcgaagctggccagcagttcgttggtctcgtggttacgcacttcgcctttgaacgggtaaacgtcgattacgtcgcccatgttcaggttagatacatcaacttcgataggcagcgcgcccgcatcttccatggtgttgaagaaaattggcgcgattttaccgcccagacacaggccgccaccgcgcttgttcggcacgttcgggatatcgtcgcccataaaccacagcaccgagttggtggcggatttacgtgaagaaccggtcccgaccacgtcgccgacgtaggctagcgggtagcctttctgctgcagggcttcgatctgtttgattgggccaaccacgcccggctgatccggctcaatgccttcgcgggggtttttgagcattgccagcgcatgcagtgggatatccgggcgcgaccacgcatccggcgccggagagagatcatcggtgttcgtttcgccggtgaccttgaagacggtaacagtgattttctctgccagctgcggacggttcaggaaccattcggcgtcagcccaggattgcataacctgtttagcatgctcgttacccgctttggctttctcttccacgtcgtagaagttatcgaacattagcagggtatgggagagcgctttcgcggcaatcggcgccagtttcgcgtcgtccagcgcatcgatcagcggatggatattgtaaccgccctgcatggtgcccagcagttcaacggctttttcaggggtaaccaggggggaggtcgcttcgcctttggcgatcgcggcaaggaatccagctttaacataggcggcttcatcgacgcccggcggtacacggttaatcagcaggtctaacaggaattcttcttcgcccgcaggcgggtttttcagcagttctaccagcgcggccatttgggttgcatctaagggtttggcaacaatccccatggcggcacgctcagctacgtgcttacggtattcttctagcacgacggttctcctcgctctcattgtcataatgcggcctacacgtcttcaatcaatctgcctctgtcctggcttagcttgccgcgtgacgcatcttgaaggatttagtggctgggcgattttcttcacgctcctgtgagacagcagtttgtagggtaaatgcccgataccgcgtcggcagcatagcaggatttttgaaaggtgttaatctgtttacaaaaaagcaacattaaaatttagctgaatcgttaagggcaggatattgcaggctttctgttcaaatcccacgacaaaaattcctttccgcgtacaacgccacgggccgatcccaacaataatcaataaaaagccataccgcttacttatactcagcaaacgcgccgttttcgcagatactttagcgagatgggttactttttgggtcaggagtttccatgtcactgccgttcaaaccccatattatcgccctgctctgtagcgctggcttactcgcggcggcaggaacactctatgtgcaaagccgaaccccagcgacgatcgctgaaccgcctgcgcagcaagcgccagcgcccgcagcgtcgacgacacagccggtggccgccacttacacccaggcgcaaattgatcagtgggtcgcccctatcgcgctctacccggacagtctgctgtcgcaggtgttgatggcctccacttatcccgacaacgtcctgcaggcggtccagtggtcccaggataaccccgcgatgaaaggggatgcggccgtgcaggcggttgccagccagccgtgggaccctagcgtcaaatctcttgtcgctttccctgccctgctggcgatgatgggcgagaatccgccctgggtggaaaatcttggcaatgcgtttttggcccagccgcatgatgtgatggattcagtgcagcgtctgcgcgccattgcccaacagaccgggacgctgaaatccacaccgcagcagaaagtgattgtcacccctgccgcaccggtttcggccagcagcagcacgacagcaaccgcaaccgcccacacagcggcgcctgcgcccacgcaggtcattaaaatagagccgaccaatccacaggtggtctatgttcccagctataacccctccaccgtctatggtacctggccgaacagcgcctatccgccggtctatctgccaccccctcccggggagcagtttaccgatagcttcgtcaaaggcttcgggtacagcctcggcgtggccaccacctgggcgctgttcagcagtatcgactgggatgatgatgaccatcaccatcacgatgacgactaccaccacggcgattactcgcataatggcgataacatcaatattaatgtaaataatttcaatcatataacaggagaaaacctgccgggaaaccacgttaactggcagcacaatcctgcctatcgcggacacacaccgtatcccgataatacggtagctcagcgcttccatcagaccaacgtttccggcggactgagcgcgacccaacatgcgccagtcgatcgcgaagcgcagcgccaggcagcgatgacccagctgcagcataacgtaccgacggccacagcgggcaatctggcggcaaacaacgcctcacgcgacgcccagcgtcaggcggcctcggcgcagctgaagcaagccacccaacgcagtaattaccgcggttacgacagtacgccgacccaacagcagcgtcgagaagccgccaggagccacgagcagaaccgcacacctcagcagcagcagcgccggcagcagttccagtccgccacgccagcccagcgtcagcagacgctcagccatctgcgcgccaacgcccttagcggcaacgaaagccgcgccccctcctggcaagcgcagcaggaacgaggactgcagagccgccagttatccggcgtaaaccgcgagttacgcgagggcgccagagaacgtctttccgaacaccatgaactgcgtcgccgctaaggatgagcagaatgagatacccattatccgttgccctgtttacgttaatgctgtcgccgcttgccgccttcgcccaacagcagtttgccacgccggaacaggccgcaactgcgctggccgaagcgatcagccagcctaatgaagccgcgctgagcgaagtactcggcgataactggcagcagtttttacccacggacgggatcgaccctgccgccgtcgatcgctttcaacgcgactggcaggtgaaacatgtcatcatccagcagggtgacaaagcctggctcgatgtcggtagcgaggcatggcgtctgcccgtgcctatcgtaaaagcgtctgagggatggcgctttgatatggccgctggcgaagaggagatcctcacccgcgccatcggccgcaatgagctttcggcgatcgccgccatgcatgcctatgttgatgcccagcaggactattatcatctgaaccaccgctgggcgcagaaaatcatcagtagcgaaggcaaaaaagatggcttgtactggccaacttcgccgggcgaagcgccaagcccgctcggtccggcctttagcccgacggtgcccggtagcggctaccatggctatcgctttcgaattatcgccggtcgcgatgaccagagcgtcgccttgctggcctggccgatagcctggggtgaaaccggtgtgatgagctttatgatcgatcaacaggatagggtctatcaggccaatctcggtgaagagagcgccgcaaaggcacaggagataacgcgctttacccccgacgctgacgccggctggcaggtggcagaaccttaaaaaaaacgcccggttgcactcacgcaaccgggcgttttcattcacttagccctggtgaggcatcagagaaggatcgccggcaaaggctggttttgtgctggataatgccgcttcgtcagcgctgatgctaccggaattcgccgcccataccccttcattggtcttcgtcacctgctgatgctgggcattcagatcctggcccatcgccgcaatgtgggtcgtttccgtaccgccgctgttgtccgcccagggaatgttggcgtcagcggcgtaagccacaccggtaaaaaacgttgcagcgaccagcgctgtggttaaaaagcgtttcatctcacacctcatcgatatcattaactacctataagtttactgagttactattttcaaagtatgtatgaggtgtagcggtttatgaacagtgacatagttctaaacatcaggcataaaaaaagcggctcccggagccgcttttgcttttttcctgaaagaaaaagttactttttcttcgctttggcgtttggcaggtcggtgatgctgccttcgaacacttccgccgccaggccaacggactcgtgcagagtcgggtgagcgtggatggtcagggcgatgtcttcagcgtcacagcccatctcgatagccaggccgatctcacccagcagctcgccgccgttggtgccgacaatcgcgccgccgataacacggtgggtctctttgtcgaagatcagtttggtcataccatctgcgcagtcagaagcgatagcacggccggaagcagcccacgggaaggtggcggtttcgtagctgatgcctttctctttcgcttctttctcggtcagaccgacccatgccacttctggttcagtgtaggcgatggatgggatcactttcggatcgaagtagtgtttcagaccggagataacttctgcggcaacgtggccttcatggacacctttgtgcgccagcatcggctgaccgacgatatcgccgatagcaaagatgtgcggcacgttggtgcgcatttgtttgtcaacgcggatgaagccgcgatcgtcaacttccacgccagctttacctgcatcgaggtttttaccgttcggtacgcggccgatagcgaccagcactgcgtcgtaacgctgcgcttccgccggtgcttttttaccttccatggaaacgtaaataccgtcttctttcgcttcaacggcagtcactttggtttccagcatcaggttaaatttcttgctgatgcgtttggtgaagactttcaccacgtctttgtcggcagccgggataacctggtcgaacatttccaccacgtcaatctctgaacccagcgcatggtatacggtacccatttccagaccgatgataccgccgcccatcaccagcatgcgtttcggtacagatttcagttccagagcgtcggtggagtcccatacgcgcggatcttcatgcgggataaacggcagctgaatcggacgggaacccgccgcgatgatagcgttgtcgaagttgatcacggttttgccgttttcgccttccacttccagggtgttagcgccggtaaatttacccagaccgttaaccaccttcactttacgacctttggccatgccagccagaccaccggtcagctgagtgatgactttttctttccaggtgcggatcttgtcaatgtcagttttcggttcgccgaaaacgatgccgtgttcggccagcgctttcgcttcttcgataacttttgccacgtgcagcagcgctttagaagggatacaacccacgttcagacaaacaccaccgagggtgctgtaacgttctacgatgacggtttccagacctaaatcagcgcaacggaaggctgcagagtaacctgcggggcctgccccaagtaccacgacctgagttttgatttcagtactcatcatgacctctgtaatttatatccggcgggtctgacgctattattcttacgcccaagtccaccgggacgttctatccgcgtgtattttacaaaattgttaacaatttttaaacaacaaacggcaaacgattttgtcctttgttgctgataatccccaacagcctgaggttatcagaaaaaagccggccgtcaggccggctttttcgattacatcaccaggcggcgaatgtcgctcagggtgttgttaatgatggtaatgaagcgggcaccatcagcaccgtcgatgacgcggtggtcgaaggacagagagattggcagcatcaggcgcggcacaaactctttaccattccataccggctccatcgcggacttagacacgccgaggatggccacttccggcgcgttaacaatcggcgcgaagtgggtggtacccaggccgccgatgctggagatggtgaagcaaccgccctgcatttcgccagccgtcagtttgccatcgcgcgctttcttcgagatggtggtcaattcacgagacagctcggtgatgctcttcttgttcacgtctttgaagaccggaaccaccagaccgttcggggtatccaccgccacaccgatgttgatgtatttcttcagcgtcaggcgctgaccatcttcggagagcgagctgttgaagcgcggcatctgctcaagcgcagcggcaaccgctttcatgatgaagaccactggagtgaatttcacgtccagtttacgcttctcagcttcggcattctgctgcttgcggaacgcttccagatcggtgatatcggttttgtcgaagtgggtaacgtgcgggatcatcacccagttacggctcaggttggcgccagagattttctggatacgacccagctccacttcttcgacttcgccaaacttgctgaagtcaaccttcggccacggcagcatgcccgggataccgccgccagcggcagccgcaggtgcggattcagcgcgtttaaccgcgtctttcacgtaagcctgaacgtcttcgcgcaggatacgacctttacggccggtgcctttcactttcgccaggttaacaccgaactcgcgcgccaggcggcgaatcagcggggtcgcgtgaacgtaggcatcgttttcagcgaattcgcttttaccttctgctttcgcagccggcgcagcggcaggcttagcggcctgagccggggcagcagctggtgccggggcagcagcctgagccggagcggcggcaggcgcagcgccttccacttcgaagaccatgatcagggaaccggttttgactttatcgccggtgctgattttgatctctttaacggtacccgcgaacggcgccggaacttccatagaggctttgtcgccctctacggtgatcagggactgttccgccgcgactttatcgccgactttaaccatcacttcggtgacttcaacttcgtcgccgccgatgtccgggacgttaacatctttcacgcctgctgcggcagccggagccgcagcagccggcgcggcagcctgtgcctgagcggctgctggcgcagcgcccgccacttcgaagatcataatcagggagccggtggaaactttatcgccggtattgattttgatctctttgacggtaccggcgaacggcgccggaacttccatagaggctttatcgccttctacggtgatcagggattgctcagcggcgatggtgtcgcccactttaaccatgatctcagtgacttcgacttcatcgccgccgatatccgggacgtgaacttctttcgctgccgcggcagccgctggagcagcggcggccggagcggcttctttcttctcttcctgcgcaggtgcagcggcggctgcaccttcggcggaatcgaaaatcataatcagtttgccagtctcggttttgtcgccgacggagactttaatctctttcacgacgccagcctgcggagacgggacttccatagaggctttgtcgccttctacggtgatcagcgactgttcagcttctactttgtcgccaactttgaccaggatctcggtgatttcaacttcatcagccccgatgtccggtactttgatttcgatagccattattcttttacctcttacgccagacgcgggttaactttttctgcatcgatgtcgaatttcgcgatagcgtcagccaccactttcttatcgatttcaccacgtttagccagttcgcccagcgctgctacgaccacataggaagcatcgacttcgaagtggtgacgcaggttttcacggctgtcggaacgaccgaagccatcggtacccagtacgcggtaatcatcagccggtacgtaagtacgaacctgctcagcgaacagtttcatatagtcagtggatgccactgccggagcgtcgttcattacctgagcgatatacggcacgcgcggggtttccagcgggtgcagcatgttccagcgttcgcaatcctggccatcacgcgccagttcggtgaaggaggtaacgctatacacgtcggaacccacgccgtagtctttcgccaggatctgcgctgcttcacgcacgtgacgcaggatagaaccggagcccagcagctgaactttacctttgctaccttcgatggtttcgagtttgtagatacctttacgaataccttcctcggcgccttccggcatggccggcatgtggtagttttcgttcagcgtagtgatgtagtagtaaacgttctcttgcgcttcgccgtacatacggaccagaccatcatgcatgatgacagccacttcataggcgtacgccgggtcgtaagagatacagttcgggatagtcagcgactgaatgtggctgtgaccatcttcgtgctgcagaccttcgccgttcagggtagtacgaccggaagtcccgccaatcaggaagccgcgagcctgctgatcgccagccgcccagcacagatcgccgatacgctggaagccgaacatcgagtagtagatgtagaacgggatcatcggcaggttgttggtgctgtaagaggtcgcagcagccagccaggatgcgcctgcgcccagctcgttgatcccttcctgcagaatctggcctttctcgtcttctttgtagtaagcaacctgctcacggtcctgcggggtatactgctggccgttcgggctgtaaataccgatctgacggaacagaccttccataccgaaggtacgcgcttcgtcggcgatgatcggcaccagacgatctttgatcgacttgttcttcagcatcacgttcagggcgcgaacgaaagcgatagtggtagagatttctttgttttgctcttccagcagcgcgctgaagtcggccagggtcggcagctcgagtttctcagtgaacttcggctgacgagtcggcagatagccgttcagcttctgacgctgagcgtgcaggtaagtgtgctcttcggaaccttccgggaaggttacgtacggcagtttttcgagatcggcatccgccaccggcacattgaaacgatcgcggacgtagcgaacaccgtccatgttcattttcttaacctggtgcgcgatgttcttaccttcagcggtatcgcccataccataacctttaatggtatgcgccaggatcacggtcggctgacctttggtctcctgcgctttcttcaatgcagcgtagactttcttcggatcgtgaccaccgcggttcagagcccagatctgctcgtcagtccagtcagcgaccagggcagcggtttccggatatttgccgaagaagtgctcacgaacgtaagcgccgtctttggatttgaaggtctggtagtcgccgtcaacggtttcgttcatcagctgaatcagcttaccgctggtgtctttacgcagcagctcatcccaacggccgccccagataaccttgataacgttccagccagcaccaccgaagatgccttccagttcgttaatgattttgccgttaccggtgaccgggccgtccagacgctgcaggttgcagttgatgacgaagaccaggttgtccagtttttcacgggtggcgatggtgatagcgccttttgattccggctcatccatctcgccgtcgcccaggaaggcgtaaacggtttgttcggaggtgtctttcagaccgcggtgttccagatatttcaggaatttggcctgatagatagcgcccaacggccccagacccatggatacggtcgggaactgccagaattccggcatcagtttcgggtgcggataagaggacagacccttgccgtgaacttcctggcggaagttgtccatctgctcttcggtcagacggccttccaggaacgcacgtgcatatacgcccggagagatgtgaccctggaagtacaccagatcgccgccatctttctcagtgcgcgcacggaagaagtggttgaagcagacttcgtagaaggtcgcggaagactgataggacgccatgtggccgcccagttcgagatcttttttcgacgcgcgcagaacggtcatgatggcgttccagcgaatcgcagaacgaatgcgacgttccagatccagattgcccgggtattccggctcatcttcaacggcaatagtgttgacgtagttgccggcggaagcgcctgcagcaaccttcactccgcctttacgggcttcagaaaggagttggtcaatcagatactgagcgcgctcaacaccttcttcacggatgaccgattcgatcgcctgtagccagtcgcgagtttcgatcggatccacgtcattgtgtaaacgttctgacatgggggtattccttatctatctaatcgttgattaatctggaacctgtcccattgaactcttcgttcttcacgctggaacaaccaaaaattcaataagacaggttctgcgtttagttgccgcgctctaaaaatggcgcttaagaaccggagttctcgtcctttcgttgctgtaaacgacgcagtgagcgctctcgacggctctgctcacgactacgatccagcaaaatttcctcaatgaacgccaggtgacggtgcgacgcttcacgcgcctgctccggctccccggccattatcgcctcgaaaatgcgagtgcgatggttgctgaccaacgggagcatttcccgccgggcatacagcaattcaaagttctgacgcacgttttgcgccaacatcggctccatacaccttagcagatgaagcaacaccacattgtgtgccgcctcggtgacggcgatttgatactggacgacggcgccggactcagcgtccaaatcgcccgactgctgagcgcgttcaatagcctgatgcagctcacggatacggtcgcgatcctcatcattgctgcgcagcgccgcgtaataggccgcgatgccttccagcgcgtgacgggtctcaagcagatcgaattgggattcagggtgatcggacagcagctcaaccagcggatcgctgaagctctgccacaggcggctctgaacaaacgttccacctccctgacgacgaagcaacaagcccttggcttcgaggcgttgaatcgcctcacgcagcgaggggcgggaaacgtcgaactgtttagccagttctcgttctggcgggagtttttcaccggggcgcaaggtcccctcaagaatcagaaactccagctgctgctctatcacatcggataattttggttggcggattttgctgtaggccatattccctgtctctgccattagcccggagtcaattggtcttaccaatttaaagttcgtagcgctaaagtaacaaagtattcaccttctgtccatacaggttttgattgaaatcagtaaacccgggacattttaacaaccttacagaaataacatttcagaaatgtaaccttgcacaaatgttacgtttactcacaaagaggtagccttaactttatagaaacgaaaaattacgctttctgaaccgattcaacgctgcaataaatgaatacagagtcatttacagtgaataaataatgacaaagcagcatgcatcaaaatacgacagattgtgactattgatgtctttttagacacatcgtcatcatcccttcataaagcaggtgcattcaaacgcgcttaccactattctgccggagacgaaaggcctttttcggaattaccacacagccttccgtaaacaaaacaatacagaaacggaagttcctgaatacacaaacacaacaatatgtgcgcgccatcactcaggtaaaaagtgggccacttcgcccaaattttcgctggctatgctttcaggcagggacagcagtgaagcagcaacctgacggatgacgtacacaaaaaataaccacacacgaggtttcatatggaaggtcaacagcacggcgatcggctgaagcgcggcctgaaaaaccgtcacattcagctcatcgcgctgggcggggctatcggcaccggcctgtttctggggagcgcgtccgtcattcagtccgccggcccgggtatcattcttggttacgctatcgccggttttatcgctttcctgatcatgcgtcagctgggcgaaatggtggtggaagagccggtggccggctcatttagccactttgcttacaaatactggggcggttttgccggcttcgcctccggctggaactactgggtactgtatgtcctggtggccatggcggaactgaccgccgttggcaaatatatccagttctggtggccggaaatccctacctgggcctcggcggcggtcttcttcatcgccatcaacgccattaacctgaccaatgtcaaagtgttcggtgaaatggaattctggttcgcgattatcaaagtggtcgccgtagtggcgatgattttgttcggcggctggctgctgttcagcggcaacggcggcccgcaggcgacggtacgtaacctgtgggaccaggggggcttcctgccgcacggcttttacgggctggtgatgatgatggcgatcatcatgttctcctttggcggcctggagctggtggggatcaccgccgcggaagcggataatccggagcaaagcattcctaaagccaccaatcaggttatttaccgtattctgatcttctatgttggttcgctggcggtgctgctctccctgctgccgtggacccgcgtcaccgcggacaccagtccgttcgtcctgatcttccatgaacttggcgatacgctggtggcaaacgctctgaacgtggtggtgctgacggcagcgctgtcggtttataacagctgcgtctactgcaacagccgtatgctgttcggccttgctcagcagggcaacgcgccaaaagcgctgctcagcgtcgacaaacgcggcgtgccggtgaataccattctcgtctcggccctggtcactgcgctgtgcgtgctgatcaactacctggcgcctgaatctgctttcggtctgctgatggcgctggtggtctcggccctggtcatcaactgggcgatgatcagcctcgcgcatatgaaattccgtcgcgccaaaaagcagcagggcgtggtcacgcgtttcccggccctcttctatccgctgggcaactggctgtgcctgctgtttatggcggcggtgctggtgattatgctgatgaccccggggatggcgatttccgtctggctgatcccggtatggattgcggtgctgggcgtgggctacctgtttaaagagaaagccgccgccaccataaaagcacaataatacatctcatcaatacttcactttgctctgcgccctcccctgaataatgggcgcagagcattgttatctgcttcacactttcccctccatagcttatttatccatatcgtcaacgagttcctgcaacgtatttctgccaaccgcagccaataattctctccatactgcaacggagagaccgcacatggcagagaacacgctttcaataagagaaaagattggttacgggatgggtgatgccggatgcaatattatctttggcgccatcatgctgtttgtgaactatttttacactgatatattcggactggcgccggcgctggtcggcgtacttctgctctcggtgcgagtcatcgatgcggtaaccgaccctatcatgggcgctcttgccgaccgcacccgtagtaaatatggtcgctttcgtccatggctgctgtggatcgccttcccctacgccctgttcagcgtcctgatgttcaccactcctgagtggacctacaatagcaaagtcatctatgcgtttgtgacctactttctgctgtcgattacctataccgcgattaatattccctactgctcgctgggaacggtgatgaccgccgatccgaaagagcgtgttgcctgccagtcttatcgtttcgtcatggtgggtatcgccacgctcctgctgtcattgacgctgctgccaatggccgactggttcggcggcgccgataaagcgaagggctaccagatggcgatgaccgtgctggcctttatcggtatgtgtatgttcctgttctgcttcgccaccgtgcgcgaacgtatccgcccggcggtgcagacgaatgacgaactgaaaaaagatctgaaagacgtctggaaaaatgaccagtgggtgcgcatcctgctgctcacgctgtgcaacgtctgtccgggctttatccgcatggccgccaccatgtactacgtcacctgggtgatgggacaaagcacccattttgccaccctgtttatcagcctcggcgtagttgggatgatgattggcagcatgctggcgaaagtcctgaccgaccgctggtgcaaactgcaggttttcttctggaccaatatcgtgctggccgtgttctcctgcgccttctatttctttaatccacacgccaccacgctgattatggtgctctacttcctgctcaacattctgcatcaaatcccttccccgctacactggtcgctaatgtccgacgttgacgactacggcgaatggaaaaccggcaagcgcatcaccggtatcagcttctccggtaatctgttcttcctgaaggtcggcctggcggtcgccggggcaatggtcggtttcctgctgtcatggtacggctacgacgccggcgcgaaagcgcaaagcgcctccgcgctgaacggtatcgtgctgctattctcagtcattcccggcgtcggctatctgatcaccgccggcgtggtgcgtctgctgaaggttgaccgtaccctgatgcgccagattcagagcgatctggagaagcgccgcagcaactacagcgagctgaacgaataccaggaactgaaaaccagtgaacacgtaaggaaagcctgatgaacaactggccaaacccctttattgaacagcgtgcagacccctttatcctgcgccatcttagccactactactttattgcctcggtgccggaatacgaccggctggagatccggcgcgcggtaacccttgaaggattacgcgatgctgagccggtcgtggtttggcgcgcgccgcaaagcgggccgatgagccagctgatttgggcgccggagctgcatgaaatagacggtaaatggtatatctattttgccgccacccatactcacgatctggatgcgctggggatgttccagcatcgcatgttcgttctcgagtgcgctgacagcgatccgctgaccggccgctggcaggaaaaaggccaggtggtcacgcctttcgataccttcgccctcgatgccaccacttttacccatcaggggaaacgctggtatctgtgggcgcaaaaatccccgcatatcgaaggcaactcaaacttgtatctcgccgaaatggctaacccgtggacgttaaaaggcgagccggtcatgctgagcaagccggagttcgactgggagtgccggggatttaaggtcaacgaagggcctgcggtactgatgcatggcgataagctatttatcagctattccgccagcgccaccgatgaaaactactgcatggggttgttatggatcgaccggcaggccgatccgctgcagccggcaaactggcataaagctccgcagccggtgttccgcaccagctatgaaaaccgccagtatggcccaggtcataatagttttacccaaacgccggaaggggaagatgtgctggtgtatcacgcgcggaattacactgagatagaaggcgacccgctgtatgatcccaatcgccatacgcggttaaagctggtcagctggcgggaagacgggatgcccgacttcggtattccaccggcggatacgctgtagcggttcggaatgttacccgctggcgcgggttctccaggccgggtcaggcgaagccgccacccggcaacatgaccagcacggcgtctgatatatcgcccggcggcgctgttgcttgccgggcctacgtgacgtgagcctgcgggtgactcgccaggccggataagcgcagcgccatcaggcaacaaaagccccgcaggtacgtacatcgtggcaggcagcgcgcgggctcaggccgttaaaccagggtaccgtaaatcgtcagcagcgccataatcaccactaccaccagcgaagtcttcttagccatcgataccgcagccttcggcgtcgctactttatccacgtgcggctcacgggccagggaatactgcgccaggcgggtcaacacctgatactgcgacgaatggcggtcgcccagcgaagcaaaccacgccgggagcgctttttcaccatggcccaccagggcatagaccacccccaccagacgcaccggcagccagtccacaatatgcaggataccatcgatcccggactgcaaccggtggtgcggcgtctggtagcgcgccagccatgtctgccaggcgcgcagtacgctgtaggcgataagcgtcagcgggccccaggcgccccccacgacaaaccagaaaagcggcgccagatagtatcgatagttaatccacagcagcgcattttgcagttcgctaaggtactcacgctcatcacagcccggcggcacgccgtgaataagcgtcagctcgctggccatggcatcgcaggcgcgactgtcattgcgcgacgccgctttcagataggcatggtagtgcagccgaactttgccggcgccaatgcatagcaggcccagtaaaatccagaacaccagcagcggtatgttaaacagctgcccctgcagcagacgctgaatgatatacacgaccgcgacagccaccagcgtcatcagtagcgtgcccggtaacgagaaatgttttatccggcgaaacgccacctccagccgatgatcaagctgccagtgttcgcccagcttaaacagccgttcggcgataagcaccaacagcgtcgtaaacagcgtcatgaggtctccttttctgacggggcgctgagcagcgcacggtattttatccagtcaaaggccggtcctggatcggttttccgcacgggcgcgatatcgctgtggcccgcaatgttttcggcgatagccggataaagcgcgatcagcagatccgtcaccgccgccagctgccggtactgcgcgtcggtatacgccagagtatcggtgccttccagctctatgccgatggaaaagtcattgcagcgttcgcgtccctgataacaggagacgcccgcatgccacgcccgcttatcgaaaggcacatactgcacgatttcgccatcacggcgaatcagacaatgcgccgaaacgcgcagatgagcaatctcggcaaagaaaggatgcgcgtgcggatccagggtaccagtgaacagcgcatcaatccacggaccaccaaattcccccggtggcaggctaatgttatgcaccaccagtaaggaaggggtctcttcatccggacggcagtcatggtgcggcgagggaacccgacgcgcgccgaccaaccacccctcgttcaactgcatgcgggatctcctttcgcgaactcatgcttccgggccacacgccggcccaaaggatgaagtgtgtatggtactgaaacgtcgttcaggttagcatgtttcccacttctgaatcttatctatctggagctttatcatgtcgcctcgtcgttacaaccccgaccgccgccgtgacgtgctgctggaacgtattaatctcgatattaccgatgctgtcgcacactccctgcgggaagatctgggcggcgaagtcgacgccaacaacgatattagcgcgcaattattgccgcaggatgcacgctcccatgcggtggtcattactcgtgaagatggcgtcttctgtggcaaacgctgggtggaagaggtctttattcagctcgccggtgacgacgtgaatatcacctggcacgtggccgacggcgatgcggtcaaagccgaccagccgctgttcgaattggaaggcccgtcgcgtattctgctcaccggcgaacgcacggcgctgaactttgtgcaaaccctctccggcgtcgccagcgtcgtccgtcgctatgtcgacctgctcgccggcaccaaaacccaacggctggatacgcgcaaaacgctgccagggctgcgtaccgcgctgaaatacgcggtactctgcggcggcggcgccaaccatcgactgggcctgttcgacgcgttcctgattaaagaaaaccacattatcgcctccggatcgatccgtcaggcagtggaaaaggcgttctggctgcatcctgatgtgccggtggaagtggaagtggaaaccctggatgaactggagcaggcgttaaaagccggggctgatatcattatgctcgataacttcaccaccgatctgatgcgcgaggcggtgaaaattaccgcaggccaggcggcgctggaggtctccggcaacgttacctttgacaccatccgcgaattcgccgataccggcgtcgactatatttccgtcggcgccctgaccaaacatgtgcaggcgctcgacctgtcgatgcgcttccgctgagcaacaggccttcacgcttccgggcgtgaaggcctgaatttgcggcccgcctcgcagtcgcccgtgctcaccatgaaatccagataaaaaccctggaacccgctttcccggatcgttttcgccccctcgcctgcgcccctcaatcccttcacagtgctcctgtcacaacaaggagcgacttatggataaacaacgaggttttaccctgattgaactgatggtggttatcggaatcatcgccattcttagcgccatcggcatcccggcctaccagaactacctgcgtaaagccgccctcaccgacctgctgcagacctttgtcccttaccggacagccatcgaactttgcgcgctcgatcatggcggcctaacgccatgcgacggcggcagcaacggcattccctcgccgacaaccacgcgctacctctccgccatgagcgtggccaaaggggtcgtcaccctcaccggtcaggagagtctgaacggactgggggtcaccctgacgccgacctgggacaatgccgagggcgtcaccggctggcagcgcgtctgcaccatcaccggcaatagcgcgcttcagcaggcctgcgaagacgttttccgggtgaagtgagggctaatgcatgaaaacagaacagctgatccccctctgccgtcgctaccacgccatgctgctgcatagcgatgaacagacaatctctattgcggtggttaataccccgccggcggagttgatggaggcgctacgcttcgcgacgcaaaagcggatcgacattgaatgctggagccaggagcagatggataagcgtctgcaggcccaggaaaagcaggcgcaactggcgcagaacgacgggccggaaaatatcgccgaacgggtcaaccagatcctcgaacaggccctgcgtcagcgggcgtctgatattcatatcgagcccacggaaacgcacttacgcatccgcctgcgggtcgatggcgtccttcacgccctaccgttgctggcccccgaactggccgccccggttatcgcgcgactcaaggtcctggccagtctcgatatcgccgagcaccgtttaccgcaggatggccagttcgcgctgaatcttgcgggacgaccgctctcttttcgcatcgccactctgccctgccgctatggcgaaaagattgtcctgcgccttctgcatcaggttgaccaggcgctggatctggaagcactcggactctcatcctcccagctggcggcctttcgccaggcgctgaaccagccgcagggtctgctgctggtcaccggcccaaccggaagcgggaaaacggtgaccctctacagcgccctgcaggccagaaaccgtgagcaagtgaatatctgtagcgtggaggatccactggagatccccatcgccgggatgaaccagacgcaaatcaatccccgcgccggactcacttttcacagtgtgctgcgcgccctgttacgccaggatccggatattgtcatggtgggcgagatccgcgatgccgagaccgctgaaatcgcgctcaaagccgcccagaccggtcatctggtgctctccaccctgcacaccaattccaccagcgaaaccctgacccgcctgcagcaaatgggcatcgcccgctggatgatttcctctgcgctctcgctggtcatcgcccagcgtctggtccgcaagctgtgtccccactgtcggcgtaatgccggcagcgccgccgacctgccgcacagcctgtggccccgcccgctgccacgctggcaggcagcgggctgcgaacattgttaccacggatattacggccggctggcgctgttcgaagtgctgcctgttacccccgggctacgccaggggatagtccagggacttaacgccattgagattgaatctctggcgcgagccgcagggatgatgacgctttttgaaagcggctgtcaggctatcgaacagggattgaccagcctcgaagaggtggtgcgggtgctggggatcccccatggcgactaagcgtctctggcgctggcgcggtatcgatgtgcagggcgccccttgtcaggggatgctatggcaaaccaagcgtctggaggtcctgcagcacctccaacagcagcgagttataccgctggctgtacgccgctgtgcggtgaagcagagcctctggcacccgcgctacagttgcgaaacgatccgccagctggcgaccctgctgcaggccggcctgccgctggcggaagggttatcgctgctggcgcagcagcagtcgcatgcccagtggcaggcgctgcttgaggcgctaggccgcgagctggcccagggcgtggcgttctctgccgcgctggcgcagtggccccaggcttttccgcccctatatctggcgatgattagcaccggcgaactgacgggcaagctcgatatctgctgcctgcagttggcgaatcagcagcaggagcagcagcggctcgccagcaaagtcaaaaaagcgctgcgctacccgctgatcgtgctctctctggcgctgttggtggtgctggggatgctctattttgtcctgcccgagttcaccgccatctaccagacgttcagtacgccgctaccgctattgacgcggatggtcgttgcggcaggcgacatgctaagtcgcggctggccgctgctgctggcctcgctgctgagcccgctgctgctcaaccagctgatccggcggcgcagcgactggttgctgcgccgccagcggttgcttaacgcgctccctctcattggctccctgatcggcggacaacagctgagcctgatcttcaccatcctggcgttaacccaaagcgccggtattagctttctgcaggggctgcaaagcgttgaagagtccctgtcgtgcccgctgtggcgccagcgtctggcgcaggcccgcgcgctgatcgttcagggggagccgatttggcaggcgttaagccgctgcggcggttttacaccgctgtgcctgcagctcatccgcacgggggaaagcgcgggagcgctggatcagatgctggaaaacctggcgcatcaccatcgccagcaaacctatcagcgagccgatagtctggctgcgcatcttgaacccatgatgctggtgataaccggctcgctggtcgggattctggtggtggcaatgtatttgcccgtttttcacctgggcgatgccattggcggggcgggaggatgagaaacactggcgccgcgcaggcgccagtgcagccgattacaggctattgaatacccggttctcttgttcctgaacgcggataaagggcgtacgcttggtcagctctttcagacgcgaggcgccaacgtaggtgcaggcagaacgcaggccgccgagaatatcacgtgcggtattctccaccggtccacgcaaaggcagcttaacggttttgccttccgccgcgcggtatttcgcgacaccgcccacatggcgggtcatcgccgactcggagctcatgccgtagaacagcatgaatttctctccgttctcttcaacgatggttccgccgctctcttcatggcccgccagcatgccgccaagcatcacgaaatcagcgccgccgccgaaggctttcgccacatcgcccggcatggtgcaaccgccgtcgctgatgatctggccgccaaggccgtgcgccgcatcggcacactcaatcacggcggagagctgcggatagccgaccccggtcttaacgcgggtggtgcagacggatcccgggccgatgccaactttgacgatatcggcgccggagaggatcagctcttcgcacatttcaccggtgaccacgttcccggcgatgatagttttttgcggccaggcttcgcgcgccttcgccacgaactgtacaaagtgctcggagtagccgttggcgacgtcgatacacacaaaattcagctgtgggttctgagagaggatctgctgggttttttcgaaatccgcatcggacgtgccggtggaaaccatcacatgcttgagtacgtctgcggatgcgccctgggtaaacgccagccattcttcagcggtgtagtgcttatgtaccgcggtcagaataccaaaagtggccagcgctttagccatgctgaaggtgccgacggtatccatgttagccgcaataatcggcacgccggaccaggtcaggcctgaatgtttaaaggtgaattcacgttccagctcaacatcagaacggcttttgagggtagagcgtttcgggcggataagaacgtctttgaaaccaagcttcagatcttcttcaatacgcatgtgcgaattcctggggttaatggcatgaatgtgagagcacaactccagtgacgttatcatacgcgcgaatcaggcccgcgcaagactgcgattttcactttttttacgctacaatcgtataaatttacctggtgaatggagaaaaaggcgcctatgccttcccctgccggagtattgtttttaaccatttgatttgcttgattaaaacaaacagtatagcggacggcgatcccggttggcgcggggtcctcacgacatgctcactgtcgcctccccggcgcgctgccagtcatcgctgtctgcctgcaaaaaatacgagcaatccgtttcagggtcagaagatatggggtacacagtcgcgttaacaggcgggatcggcagcggtaaaagtacggtcgccgacgccttcgcgcagcttggggttaaggttatcgatgccgatgttatcgcccgtcaggtggtcgagcccggtaccccggcgctccaggccattgtcggccactttggaccacagatgattgcccccgacggcacgctgaaccgccgcctgctgcgggaaaaaatttttgctcacgtggaggaaaaagcctggctcaatgcgctgttgcacccgctgattcagcaggaaacgcgccgccagatgcaggccgccacctccccttatctcctctgggtcgtacctttgctggtcgaaaaccgcctgtccggccaggccgatcgcgtactggtcgtcgatgtgccgaaagagacgcaaatcgaacgcaccatgctgcgcgataaggtcagccgcgaacatgctgaacatattcttgccgcccaggccacgcgccagcagcgcctggccgtcgcggacgatgttattgaaaacactggcacgccggatgcagtggcatcggatgttgcccgcctgcacgaaaagtatttaacgctggcatcgcaggccgcctcacaggaaaactcgtaatgcatacccccgttctgtttgaacatcctcttaatgagaaaatgcgcacctggctgcgcatcgaatttctgatccagcagatggctttccatccgcagattgccagccatgccgatgcgctccattttttccgtaacgccggcgatctgctggatgtcctggagcgcggcgagttgcgcactgacctggttaaagagctggaacgccagcagcgtaagctccagtcatgggcagaagtgccgggcgtcgatcaggagcgcattaacgagctgcgccaccagttgaagcagtcctccagcaccctgatggccgcgccgcgcattggtcagtttctgcgtgaagatcgcctgattgcgctggtgcgtcagcgcctgagtattcctggcggctgctgcagcttcgatttaccgaccctgcatatctggctccatatgccacaggcgcatcgcgacgagcaggtggccagctggcttgccagcctcgatccgctggtccagtccctgagcctgatcctcgatcttatccgcaactccgcgctgttccgcaaacagaccagcctcaacggcttttatcaggataatggcgaagatgccgatctgctccgcctgcgtctcgatctggctcaccagctttatccgcaaatttccggccataagagccgtttcgccatccgtttcctggcgctggacagtgaatatggaatcgtgccggagcgctttgattttgaactggcctgctgttaaggagataacatgtcagaagagactatcgtcaactgcccgacctgcggcaaaactgtggtgtggggcgagcagagtccgtttcgtccgttctgtagcaagcgctgccaactgatcgatctgggagaatgggctgcggaagagaagcgcatccccagcgcgggggatctctccgatagcgatgactggagcgagcagcaaccctgatttgatggcaagctaacccggcgcctggcgggttagcctcgcgccccggggctcagccctgggcgataagtttgctgataaccggttcattcgccggaggaaacgccgccggatccaacgttggtcccgccatccaccgacccggctgcccttctttaccccacggctcgccttgccaactttccacgaggaaaaaccacagcgtaatatggcgatcggggaactgatactccagcttatcaaagagcgaagaggtggtgaccgtaatcccaacctcctcctgcagttcgcggattagcgcctgctcaggcgtctcatcagattcaatcttcccgcccgggaactccagcttattcgccatatgggcatcggcggcgcgctgggtaataaagatttcgccttgcggattgcgaattatcccgacggcgatttgcagttttttcattgaatgcgctccataaaaaaggcgcagaactctgcgcctttgtttgttttatcagaccttagctcagacggccgtgacactgtttgtactttttgccggagccgcacgggcacggatcgttacggcccactttacgttcgccggtttgcgccgccagatcctgggctgcggcttcatcatcgctctgatggctgagctgctgcatctgcgccaggcgctcggcctcttcacgacgctgctgttccatcgcctcgacttcttccggcatccgcacctggactttgctcagggtgctgatcacttcatacttcagtgactccagcatcgcggcaaacattgagaacgattcgcgcttgtactcctgcttcggatctttctgcgcatagccgcgcaggtggataccctggcgcaggtaatccatcgccgccaggtgctctttccacagcgaatccagagtctgcagcatcacgcctttctcgaagtggcgcatcatctcggcgccgaccacttcttctttacgctggtaggtttctaccgcgctctgcagaatacgttcgcgcagggtctcttcatgcagctccggctctttatccagccactctttgattggcaggtcgagatcgaagtcgtttttcagacgctcctgcagaccttcgatatcccacatctcctccagcgactgcggcggaatatgggcatcgatcgtcgccttaaagacgtcttcgcggatgctgttgatggtttcgctgacgtcagacacgtccagcagctcgttacgctgggtgtagatcgcccggcgctggtcgttggccacatcatcatattccagcagctgcttacggatatcgaagttacggctttccactttacgctgggcgttggcgatcgccttggtgacccacgggtgctcaatcgcctcacctggtttcattcccagtttacgcatcatgccagacacgcgatcggaggcgaagatacgcatcagggcatcttccattgacaggtagaagcgggaagaaccggcatccccctgacgaccagcacggccgcgcagctggttatcgatacggcgagattcatgacgctcggtaccgatgatgtgcagaccgcctgcggccagtaccgcatcgtggcgtacctgccagtcggctttgattttctcaatctgctctggcgttgggttttccagcgcagcgacttccgcctgccagctaccgccgagcataatatcggtaccacgacccgccatgttggtggcgatggtcaccgcggaagggtagcccgcctgggcgacgatatccgcctcgctggcgtggaatttggcgttcaggacgttgtgcttgatgccagctttagtcagttcgcgggaaaccacttcagatttttcgatcgagatagtccccaccagcaccggctgaccggcagcggtacgagttttgatatcttcgataattgcctgaattttttccgcttcggtcatatagaccagatccgccatgtctttacggatcatcggacggttggtcggtacaaccacggtatccagcttatagatagagctgaattcaaaggcttcggtatcggctgtaccggtcatccccgccagcttctcgtacagacggaagtagttctggaaggtgatagaggccagagtctggttctcgttttggatctccacgccctctttggcctcaacggcctggtgcagaccatcggaccagcggcggccctgcatcgtacggccagtgtgctcatcgacgatgataacttcgccatctttgacaatgtagtcaacgtcgcgggtgaacagcgcatgggcgcgcagcgcggcggtaacgtggtgcatcagcataatgttggttggagagtacagggactcaccttcatccataatgccttcctgtaccagcagctcttcaatcagcaccagaccacgttcggtcaggttaacctgacgcgctttttcatccaccgagaagtggccttcgccagtgaaagtgtccgaatcctctttttcctggcggatcagatgcgggatgattttgtttaccttgcggtacatttcagagctgtcttccgccgggccggaaatgatcagcggcgtacgcgcctcatcgatcaggatggagtccacctcatccaccagcgcatagtgcagtttacgctgaacgcgctcttccgggctgaaggccatgttgtcgcgcaggtagtcgaagccgtattcgttgttggtgccataggtgatatcggcagcgtaagcttcacgcttcgccggcgccggcaggccggacatgttgatgccaactgtcatgcccaggaattcaaacagcgggcggttattttcggcgtcacgctgggccagatagtcgttgacggtcactacgtgaacgcctttgccggttagcgcgttgaggtacgccggcagggtcgcggtcagggttttaccttcaccggtacgcatctcggcgatgcagcgatcgttaagcaccataccgcccagcagctggacgtcgaagtggcgcatgccgaatacgcgcttactggcttcgcgaacgacggcgaaagcttcagggatcaggctttccagcgtttcgcctttttccaggcgcgcgcggaattcagtggttttcgctttcagctcgtcatcagagagcttttccatcgccggttccatgccgttgatgatattgacgactttgcgcatacgacgcagcgtacggtcgttacggctgccgaaaaccttggttaacattttgataagcataataaaatctcaaacgccccgcggtgcggagtcacaaaaaataggatggtccgtggttattttcagctgagacgttgaggccctgcgcggatccccgccacctggcttatccaggcgctgacgcggaaggcagaatatgaagaagggatgtaacccgcctggcggatcaccaccggcggcgtgctgtcctgcgtcagcagcgcgctgagggtgtcgagcagcgccagatgctgagcctgcagcggggaagtttcttccgccaccggcagcgcctgcggcgccatggcgaaggagagatgacgaataacggtgcgaatggcgtgctgatgccagtagtcgacggtaaagctgggccggcgattcgtctccagaagcgccagctgagagaaattaaccttgctcggattgtgattgctggcggtcgccttcgctggcgccgcggtctcgtgaccgttgcttagcgcaggcaggccgaggctggccgcgaccatccccaacaggagatgcggccaaaaataccgtctgccaaactgtcgccagcgcgtcagcaatccactcacgttcattacctttctttgctagacccgtcgtcgttcaggctgtctctttattaatgtttttcgcaggacaacctgatgtccacggggtaaagcaaccctgagaaataattttgcgctcaaatactaacattaataccggcctgaggcagcatgaatgaaggcgattgcccggcgaaaacgcttaataaagcagcgaacgcacgctaattattatccagggatcgcagcgaaaataactggagggtgctataaaagaaaaacgactggctccctggtcggagagagtaccaggttaccagtcgaatttactgaatggtcaggcttacgccagaaccattgacggtgcgcggaacgccattggcagttttgcgtcgtcttcgaaggtcacatactcccaggcttcctgttttgccagaaccgcctgcagcagtttgttgttcaacgcgtgacccgatttgtacgccgtgaatgcgccgataatgttgtgaccacacataaacaggtcaccgatcgcatccagcattttgtggcgaacaaattcgtcttcaaagcgcagaccgtcttcgttcagtacgcgataatcgtcaacaacgatggcacaatcgaagctgccgcccaggcacaggccgcgggactgcagatattcgatatcgcgcataaaaccgaaggtacgcgcacggctaatctgacgcatgaacgcatcggccgagaagttcagcgtatagcgctgggtgctggcatcaatcgctggatggttaaaatcgatggtgaagtccagcgaaaaaccattgtacggtttgaattcagcccatttgtcgccatcttcgacgcgaaccgtctctttgatacgtacaaatttcttggcgcagttcagttcatcaatgccggcgtccagcaacagataaacgaacggagccgcactgccgtccataatcgggatttccggcgcatcgacttcaacaataatgttgtcgatacccaggccagccaatgcggcgttcaggtgttcaaccgtagaaatccgcacgtcatgctcattaaccaggcaagtacagagcatggtatcacgcacagatttggcatcagccggaaaatctaccggtggattcaagtcggtgcgacgatagatgaccccggtatttgccggcgcagggcgtaacgtcagtgtgactttcttgccggtatgcaaaccgacgccagtcgcctgaacgatacgtttaagagtcctttgtttgatcatcgtataatctcgccaatttacctatccaaccgaagtgtacaccactatcgggaggccagtttagcacaaagagcgcagatgcccaacttccagtcgattcttaatcggcttgcttacgcaggaaggctgggatatccagataatccggctctttcgcggtttgcggcgtattgtcgttcaccactttggctgccggcttctgctcttgcgtcagcggcgacataccatgctgctggtaacgatccatcaccggctgctgaacctgcttgttggttaccagggtgatttccggacgcttatccatgccaataccggtcgccactacggtcacgcgcagctcgtcgttcatatccgggtccagagaggtaccgataaccactgtcgcattatccgaggcaaaagcacggatggtgttacccacagtttcgaactcgtccagacgcaggtcgaagcccgcagtaatgttgaccagcacgccgcgcgcgcctgacaggtcgatatcttccagcagcggagaagagatagccatttcagccgcttcttccgcacggtcttcaccgctcgccaccccggagcccatcatcgcgtagcccatttcagacatcacggtacggacgtccgcgaagtcgacgttcatcagacccggacgggtgatcagttcggcgataccctgcaccgcgcctttcaggacgtcgtttgccgcgccgaatgcgtcgagcagggaaattccacgacccaggaccttcagcagcttgtcgttcgggatggtgatcagtgagtcaacgtgcttggacagctcggtgatcccctgctcagcgaacgccatgcgcttcttaccttcaaaattaaacggcttagtgaccaccgcaacggtgaggatccccagatctttcgccacttccgcgactacgggcgccgcgccggtaccggtaccgccgcccatgcctgccgcgatgaacaccatgtctgcgccatcaagggctgcgcgcagcgcttcacggtcttcatcagccgcgttacggccgacttccgggttcgcgcccgcgcccagacctttggtaataccgctaccgatctggatagtctggccaaccgccgtcttacgcagcgcctgcgcatcggtatttaccgcgaagaattcaacaccctcaatgcgctcgcgcaccatgtgttcaacggcgttaccgccgccgccaccgacgccgatgactttaatcaccgcgtcgttggtcagttccataggttcaaacatagtttctctccgtcttgtgcctgtcgcctgagaacgctaattgtctgcgttctcttaaaaaattaaaactcttttcgcagccagctgttgagtcgcttaatccacgagcccactgaggccgtcacgcgtttttctacttccgcttcaccactgagatgtgactcttttccgtagtgcagcagccccaccgccgttgaataatacggctcctgggcatagtcggttaaaccggtgatgttcagcggcgcgccaatgcgcacctgagtatggaacacgcgctgcgcacaggccgccagaccttcaatttgcgccgcgccgccggttaacacaatccccgccgccagatgatgtttaacaccctgctggcggagctgttcctgcagctgcaggatctcttcattgaccaggttaagcagctcggtatagcgcggttcaatcacctctgccaacgtctgacgctgcaggctacgcggcggacgtccaccaacgctcggtacttcgacgttttcgtctttaccgacgatggaacccaatgcgcatccgtgacgaaccttaatcgcttcggcatcgctcggcggcgtaccgaaggcataggcgatatcgctggtcaccacgttaccggcatacgggatcactttggtgtgacgcaatgcgccgccggtgtagacggcgatatccattgtaccaccgccgatatccacaacgcagacgcccagctcacgttcgtcttctgttaataccgaataactggccgctaacccggcgaaaataagttggtcaactttcagaccacaacgttccactgctttaacaatgttttttgccatatcgttatggcaggtgatcagatgcaccttcgcctgcatacgcacgccggacagccctaccgggtttttaatcccttcctggtagtcgatagcatattcctgcggaatcacgtgcaggacacgatgttcatcgcgaacgcgaaccgacttcgcggtgtggaccacgttctcgacgtcgtcctgcgtcacttcttcttccgaaatcggtaccatcccgatttcattctgacagcttatatgtttacccgaaagtgccaaataaactgatgaaatctggcaatccgccatcagttcggcctggtcgatggcgcgctgtacgcatttcaccaccgactcgaggtcgttcacaccgcctttatccataccacgcgatgggcaactgcccacgccgatgatattgatcatgccgtcgggcagaacttcccctactaaagcggccaccttggcggtgccaatctccagtccaactaccagttttctgtccgtcgccttgatcattgttgttctgcctgtgcctgattctgttgttgattagtttcctctgcgggagcaggtacccagcccactgccgcacccgagtcataacgcaaatcaacgtagctaatccgtttgccgtcggtctgcgcctgctgctgaagaaccgggtagagttccataaagcgctgaagccgtttcatggtatcgccacggccaaggttgagcttgatgtcattattaagcgtcaactgccaggagcgacgggcggtcatcgccgccactttcaacgtgaatttatcctttgccagcacctgccccatgtcacgatacccctgcagcacttcgttctcgctgccttcgggaccgtataacatcggtaaattctgtttgctggtgcgatccgccggcacgctgaaggcatttccttctgcatccaccatatgttgatcattccagcgcgcaatcggcacatattcaaccagatgaatcttcaattcatcgggccactgctttcggacgctcgcctgcttaatccacggcagacgttcaatctggctctggatgatgttcacatcctgagtcataaaggtacccggcgaacccagcgccaggatcgcctgacggatgtcatcattgcgcgtatagtgacgctcgccggtcaccaccatcttcgacagcggtaagcgctgcgcatcttccatccagccaagaaccatccacccgctgaccagcacggtaaacagcaccgccagcaggaaaacgatccctgccagccgcgttccattactccgacgcgaagaagaagcctcttcttcatggttccgcgtattcagcgcagcctgcgacatatcaccccgccaggtccagaattcgtacaacaagctgggagaagctcattcctgcctgacgcgccgccattggcacaaggctgtggctggtcatgcccggggaagtattcgcttccagcagataaaactggccatcgctgtccagcatcacgtcaatacggccccagcctttgcaacccagaacattccaggctttaagcaccaggttctgaatagcggactcacgcgcgggatcttcaaatcctgggcagaaatattgcgtctcatcagagagatacttcgcctcataatcatagaaggttcccgcggcctggatacgtattgacggtaaaatttcttcaccgactatggcgacggtaaattccggtccactgagccatttttcgaccaaaacttcatcatcatgctgaaaagccaacgccaatgcacttgctaaatcacaactttcgctgactttcgacatcccgacgctggagccttcacggctcggcttgatgatgaccggcagacccagcgccgcaatttgctgttcgacgtcagtagacagcccggcggcaaactgggcgcgggtcagcgccacccacggcgcgaccggtaatccggcgccctgccacagccacttgctgcgcagcttatccattgaaatcgccgaagccatcacgccgctgccggtataaggcagctggattaactccagcagcccctgcagagtgccatcttccccgccgcggccgtggagggcaataaacgctttcttaaagccctgcttttttagctgggtaatatcaacatcgcgcgggtcgaccggatgggcgtccaccccgccttcacgcagcccggccagcaccgccgcgcctgaattcagcgacacttcacgttcagcggaggttccaccgaaaagcaccgcgattttatcagccatggcgctcctcctccgttttttgcgggatcagtttgatttcagccaggtggcgggcgattttaccgatgttaccggcgccctgcaccagtactaaatcgttgccggtcaggactgacgccagcatctccgcggcctgggccgaatcgggcaccaggatcggatccactttcccgcgaccgcgaatggtgcggcacagcgagcggctgtcggcgcccgggatcggcgcttcgcccgccggatagacgtccagcatcagcagggcatccacctgggtcagcacgttggcaaaatcatcatacagatcgcgggtacgggtataacggtgcggctggaataccatcaccaggtttttatccggccagccggcgcgcgctgctttaatggtggcgtccacttccgtcgggtggtgaccgtaatcatcgatcagcatcgcgctgcccggtttgccgttgacttcggccagcggaaactcgccaagaaaatcaaagcggcgtccagttccctggaagctctccagtgcgcgcagaatagcccgatcgtcaatcccctcttccgtcgccacggcgacggccgccgccgcgttcagcgcgttatggcgtcccggggcattgagcgtcacctgcaggatcgctttatcctggcgtaccaggcggaaatgcccctgcgccccaacctgacgatagtcctcgacgcgcacgtcggcgtcgtcgctaaaaccgtaggtggtgatctgccggccaacgcgcggcagcagttcccggatcaccggatcgtccacgcacatcaccgcgcgtccgtagaacggcaggttgtgcaggaagttgataaatgtctgcttcagattctcaaagtcgccatggtaggtatccatgtgatcggcttcgatgttggtgacaatggccaccatcggctgcagatgcagaaacgacgcgtcgctctcatccgcttccgcgatcaggtaacggctatggccaagacgggcatgtacgcccgccgcttttaccagtccgccgttgacgaaggtcgggtccagcccggcctcggcgtaaatgctggataccatcgcggtggtggtggttttgccgtgggtcccggcaatggcgatcccgtggcgaaagcgcataagttccgccagcatttcggcacgacggatcaccgggatacgcgcctcatgcgcggcaacgatttccgggttatctgccgaaatcgcgctggaaacgacaaccacgctggcatcacgcacgttttccgggcgatggttgaaataaatggtggcgccaagctgcgacagctgctgggtcaccggattcggcgccaggtcggagccgctgatctggtaaccttcgttagccaacacttcggcaataccgcccataccggcaccgccgatgccgacaaagtgaatgtgccgaacgcgacgcatctcgggcactatggaacgcagttttgccaaatcttgtgtattcattctttacgccatcaacttctgtattcgggcggtgaaaatcaccgcaattagcgcgccaaagctacggcgctgacctcttctgctacccgctcggtagcgtccggaatcgaagcgccacgcgctcgttccgccatatccagcaaggtttcccgatcccagctcgccagggtagaggcaaccgcctctaccgtgaactcaggctgttcaagaattttcgccgcgccggctttctccagcggcagcgcattccagtactgctgacgatctttgtgctggaacgggacaaacagcgctggtaaacctgcggccgcgatttcgctaaccgtcagcgcgccggaacggcaaaccacaacatctgcccaggcatacgccgcggccatgtcatcaataaattccgtcactttatgctgcggctgtccggcggcggcataggcctgctgcacggtttgctggccgcctttgccgctttgatgccagatggtcaccgtagcgccgagcttcgccgccacctgcggcatcgtctggttcaggacgcgcgcgccctgagagccaccgaccaccagcacgcgaatcggtccctgacggccaaccagacgctgacctggcagcggtagcgccagtacatctgtgcgcaccgggttcccaacgacgtccgcatgcgggaacgcgccgggaaacgcctgcatcactttcttcgcaatcttcgccagccacttgttagtcaggccggcaatgccgttttgctcgtggaggaccaccgggatccccagcgaccacgccgccagaccgccaggcccggaaacatagccgcccatgcccagcaccacgtccggctggaaacgcttcatgatcgcccgcgcctgacgccaggcgttaaagatacgcaccggcgccagtagctgcgctttgatacctttgccacgcaggccggagatgcggataaaatcaatttcgatgccgtttttcggcactaaatccgcttccatacgatcggcggtacccagccagcgaacctgccagccctggtccattaaatggtgcgcgaccgccagtcccgggaacacatgcccgccggtaccgcccgccatcaccatcaaccgcttttcctgaccgctcatcgcacaccccgtgtaaacgcctgggctttttccagacgcgtttcataatcaattcgcaacaacaacataatggccgtcgacataatcaacagactggaaccaccataactgatcagcggcagcgtcagacctttcgtcggcagcatccccgccgccgcgccgacgttaactaacgcctggaagctaaaccagataccaatcgcacaggcgaggaagccggaaaagcgatgatcgatctccagcgctttacggccaatcgacatggcgcggaaagcgacgaagaataccattaaaagcgccagtaccacaccgatataaccgagttcttcgccgataatggcgaagataaagtcagtgtgcgcttccggtaaatactccagtttttgcaccgagttgccgaggccctgcccccacatctcgccgcggccgaaagccatcagcgactgggtcagctggtagccgctgccgaacgggtcttcccacgggttccagaaggaggtcacgcggcgaatacggtatggttcggcgaggatcagcaggaccaccgccgaaatacccatgccgataatggcgatgaactgccacagcttcgcgccggcgagaaacagcatcgccagcgtggtgacgaacaggaccaccacggtaccgaggtcaggctgcgccagcagcaggatggccagtacgaaaatcacgcccatcggttttaagaagccgcgcaggttgttacgcacttcgtcggctttacgcaccagatagttggcgatgtagcagaacagcgacagcttggtgaactccgccggctgaatacgcagcggaccaagggctatccagcgcgatgcgccgtttaccgagctgcctactaccagtacgatcagcagcatgacgatcgaggcgatcagcatcgcggtactgtggcgctgccagaaatccatcggcagacgtagcgtaatcatcgccagcgcgaaggccagcacaatgtacaggccgtcacgcttggcgaagaggaaaggatcgttcgccaggcgctgtccgaccggcatcgacgccgaggtcaccataataaagccgatcgccgccaggccgaaggtcagccatagcagcatccggtcatacatcaccagactgtcgttatctttcgggcgcgagcccatcacccagcctttcagcgcagcgaatagccaggcgaaaataaacatccccggcaatcgcggcagtctcagccgaggcaggctcagctgcggcattctcaggcgtgggagagagaaacgcatcaacctaactccttcgccagacgggcaaacatctcgccccgttgttcaaagttcttaaactgatccaggctagcgcaggccggcgacaggagcaccatgtcccccgctttcaccaggggagcaatctgacgcatcgcctgttccatagtctcagtttgtaccgccacctcaggacgcagctcagcgagctcggcgccatcgcgaccaaagcagtacaggcgaatacgatcgccgccgaggtagcgcttcagcggggtaaaatcagcggacttgccgtcgccgcccagcagcagatagagcgtgccgtccagctgcaggccgttcagcgccgcctcggtgctgccgacgttggtcgccttcgagtcgttaatccagcgtacgccgttgtgatccagcaccagctggaaacggtgcgccagaccggtaaaggtggtcagcgccttcaggctgctggcccgcggcagacccgcggcatcggccagcgccagcgccgccagggcgttgctgtagttatgctgaccggtgagaggcatctctttcacattgaggactttctcacctttaacgcgcagccaggtttcgccctgctggcggttaaggtggtagtcaccgacatcgacgccaaagctaatgcagcgttcgtccgccccgcgtaccggcatggtgagcgcatcgtccgcgttcaccacgcaggtcttcgcattctcgtaaatccgcagcttcgccgcgcgatactgctgcagtcccagcgggtagcggtccatatggtcctcagtcacgttgaggatggttgccgccaccgcctgcaggctggaggtggtttccagctggaagctggagagctccagcacatacagctctcgatcggtgtccagcaacatcagcgccggcaggccgatattgccgcccacgccgacgttaactccagcggctttcgccatctcgcccaccagggtagtaacagtgcttttgccgttagaaccggtaatggcgataatcggcgcctgcgcttcgcggcagaacagttcgatatcgccaacgatctctacgccagcgtcggccgctgcgctgagcgaaggatgggccagcgcaattcccggactggcgacaatcaggtccgccgccagcagccaggtatcattgagtccgccgacatggcattcgaccgattcgggtaatttatccagccccggaggcgcgacgcgggtgtccatcacgcgcggggttacgccgcgcgccatgaaaaagtccacgcatgacaggccggtcatgcccagcccaattatgacgacttttttaccctgataatctgccatgattaacgtaccttcagcgtcgccaggccaatcagcaccagcatcagcgaaataatccagaagcgcacgataacgcgcggctccggccagcctttcagttcatagtggtggtggatcggcgccatgcggaagatgcgctgaccgcgcagcttaaaggagccgacctgcagaataaccgacagcgtttccaccacgaaaaccccgcccatgatcaccagcaggaactcctgacgcagcagcacggcgataatgcccaacgcgccgccgagcgccagtgaaccgacgtcgcccataaagacttgcgccgggtaggtgttgaaccacaggaagcccagccccgccccgacaatcgccgtacagacgatcaccagctcgccggcgtggcgcagatacgggatatgcaggtagttggcgaaattcatgttgccggtggcccatgccaccagcgcaaagcctgccgcgacgaaaacggtcggcataatcgccaggccgtcgaggccgtcggtcaggttgacggcgttgccggtaccgacgataacgaagtaggccagcaagatatagaacagccccagctgcggcattacgtctttaaagaacggcaccaccagctcggttgccggggtatctttccccgccagatacagcgcgaaggccacgcccagggcgatcaccgacatccagaaatacttccagcgggcgatcaggcctttggtatctttgcgcacgactttacggtaatcatcaacgaaaccgatgatgccgtagccgattaataccgtcagtacgcaccagacgtacgggttagatggataggcccacagcagaacggaaacggtgatcgcggtgaggatcatgatcccgcccatggtcggagtaccgcgtttactgaaatgagactccgggccgtcgttacgtacgacctggccaaaggcgagtttttgcagacgggcgatcatgcgcgggcccatccacaacgagatgaacagcgcggtcagcaggctgacgatggcgcgaaacgtcagataagaaaagacgttaaagccggaataatatttgaccaagtgttcggccagccatactaacatgtcccagtctcctgtaatgcgcgtactacctcttccatggcggcactacgtgaacccttcactaaaatggtcattattttgtgctccgccagcagctcgcgcaggcgagccaccacggcggctttatcgttaaaatgttcgcccacgccgctggcgcggctgatatccgcgctcaaggcgccgacgctgaggacgcaatccagccccgccgctttcgccgcttcgccgacttcgcgatggcaggccgcgctctccgcgccaagctctgccatatcgccgaccaccatcgtgcgaaagccgggcatctctgacagcacctgcaccgccgcggtcatcgaaccaacgttagcgttataggaatcatccagcagcagctggctctcggtcagccggatcgggaacagacgtcccggaacggcctgcagctgcgccagtccggctttcaccgccgccaaatcggcgcctaccgccatcgccagcgaagtggcggccagcgcattagcgatgttgtggcgtcccggcagcggcagcagtacgtcaacgttgccggttggggtctgcagcgtaaattcggtgccgtggctggtgatctgcacgttggtcgccgtgaaatcgctgttcgccgcgttcggcgagaagcgccacactttgcgatcgccaatcaccgcctgccagttcagccagtcgttattgtcggcattgaggatggcgatgccattttccggcagaccggtatagatttcgcccttcgccttcgccacgcccgccagcgaaccgaaaccttccaggtgcgccgcagcaaggttgttgaccagcgccgcttccggacgcgtcaggctgacggtccaggcgatttcgccctggtggttggcgccgagttcgatcaccgcgtactgatgctctttggtcagccgcagcagcgtcatcgggacgccgatatcgttgttcaggttgccggcggtatacagcgtgttgccgcactggctgaggatcgccgcggtcatctctttaaccgaggttttaccggacgagccggtcagggcgacgacgcgagtcggcacctgctgacgcacccaggcggctaactcaccgaaagcctgccgggtatcgttcacaatcacctgcgggagatcgcaggccagcggacgactcaccagcagcgcgccggcgcccgccgctttcgcctgttcggcaaaatcatgggcgtcgaaacgctcccctttcagcgccacaaacaggcagcccgccgtcactttacgggtatcggtggtcacctcgtcgatagcgacatcgctaccctgccgttcgccatgggcgatcgcggcaagttgacttaacgtaaagcgaatcatgctaccgctcccagcagacgcgcgacggtcacgcggtcggaataatccagacggcggttgccgacgatctggtaatcttcatggcctttacccgccaccagcaccacgtcgttctctttcgcctgcatcacggcgttggtcaccgcttccgcgcggccttccatcaccttcgcctgacctgcatcgagcatgccggccagaatatcgttgataatcgcccgcggctcttcggtgcgcgggttatcgtcagtaacgaccacgatgtcggcaaattcttccgcgatagcgcccatcaacggacgtttacctttgtcgcggtcgccgccgcagccgaagacgcaccacagcttgccgctgcagtgcaggcgtgccgcctgcagcgctttttccagcgcgtcaggcgtatgggcataatctaccaccacggcaggtttacccggcgcgctgaacacttccatacggccgcacaccggctgtaaacgcgctgcgctcttcagcagatcggccagcggatagcccagcgccagcagcgtggccagcgccagcagcaggttgctgacgttaaatgcgcccatcaggcggctttcgatttcgcccttgccccagctggagtcaaactggatggtcgccccgctgtcgtgatagttcaccgcggtggcctttagccagcggccgtggcaattcgggttgatatgatcttccatcgataccgccaccgcgtccggcagttttgccagccagcgacgaccgacttcatcgtcagcattgacgatggcctgaccgcaatgatgggtggagtacagcatccatttcgccgcttcgtagtgctccatgtcgccatggtagtcgagatgatcgcggctgagattggtaaacaccgaggcggcaaactgcagggccgctacgcggtgctgtaccagaccgtgggaggagacttccatcgcgccgaaggtagccccctgcccgaccagactggagagcacatgttgaacgtccaccgcggaaccggtggtgttttcagttggaacgactttatccagcagaccgttaccgacggtccccatcaccgcgctggtttcgccgagcagctttgcccactgcgccagcagctgagtggtggtggttttcccgttggtgccggtgacgcccaccagacgcagctgctgcgacggctgatgataaaaacgcccggccagcgccgataagcgttcgttaagctggctcaggtagataaccggcacgccgtgtatttcacagatctcaccgtctttagcttcgccctgcgcttcagcaataatggcagccacaccttgcgctatcgcctgcgggatataacgacgcccgtccgcctgatgaccctgtaccgcgataaagagatcgccggaagcagccacccggctgtccagcgtcatctctcgcagaatgcgctccggtgcgtttggcacccatggagcgagtaggtcgcgcaaattacgatctgccacctgttccctcgccttgattaattacaaattcacttttttcgcccgttgccagcgcatccggctcgatgttcatggtgcgcaatacgccgcccatgatggcaccgaagaccggcgcggaaacggcgccaccgtagtatttacctgcctgcgggtcgttgatcaccaccaccagcgcgaagcgcggatggctggcgggcgcaacgcctgcggtgtaagcaatatatttgttgatatagcggccatccggccccacttttttcgccgtaccggttttaatcgcgatacgatagcctttgatcgccgctttcacaccgccgccgccgggcagcgccacgctttccatcatatgaacgacggtacgaacgagtgattccgggaagacgcgctcgcccggaaccggaggatcaaccttggtaatcgacaacgggcgatagatgccatagctgccaatcgttgcgtagactcgcgctaactgtaacggggttaccattagcccatagccgaaagaaaaggtggccctctctatgtcagaccaccgttgtttttgaggatataagccactgcgttctccgaccaaccccaaattggtcgcctttccaagcccaaaacgtgagtaagtatctactaacgctgaggacggcatcgctaacgccagcttagaaacaccgacgttactcgacttctgtagcaccccggtcagggtcaattcgctgtagcgcgccacgtctttgatttcgtggccgttaattcgataaggcacggtattgagcacggtattttcgttgacgataccgcgctgcagcgccgtcatgaccaccatcggtttcaccgtcgaacccggctcaaacacgtcggtaatcgcacggttacgcatggtgtcttttgccgtaccggcgaagttgttcgggttataggatgggctgttggccatcgccagcacttcaccggtgttaacatccactaacacggcgctgcccgactcggctttgttaaaggccacggcgttgtttagctcgcgatagaccagcgcctgcaggcgttcgtcgatactcagcgccaggttgtgcgctgcctggctatcggtagaagagatgtcttcaattacccggccatagcggtctttacgtacgatacgctcgcccggctgaccggtaagccatttatcaaagcttttctcaaccccttcaatcccctggctatcgacgttggtaaagccgatgaggtgagcggttacttccccggaagggtagtaacgacgggattcttcgcgcagatgaatgcccggcagcttcagcttcttgatgtaatcggccatgtcagggttaacctgacgcgccagatagataaaccgcatccgcggattggtattgatgcgcgtcgccagctgatccagcggcatattgagggcatccgccagcgctttccagcgcgtatccagggtaaccccgccggcgtcatggagctctttcgggtcggcccagatagccttcaccggcacgctgaccgccagcggacgtccggagcgatcggtaatcatcccgcgcgcggtggacacttcctgtacgcgcagagaacgcatatcgccctggcgcaccagcatatcggggctgatcacctgtagccaggcgacgcgacccagcagaaaagccagcgccagcagaatacagccgcacagcaacgcaaaacgccaactgataaagttggcctgttcttcctgacgttttgctttaggcgtttttggcgctgctttcatccgtcgcaataatccttatttctgtacaacgatattttcttgtgatggatcgacgtgttgcatctgtaacttctcggtcgcgatccgctcaacccgactgtgatcgccgagcgcgttctcttcgaggatcaggttgcgccactcaatatccagggcgtcgcgctccagaaccagctgttcacgctgcgcggtcaacaggcgcgtgtgatgcgcagtggtgaccacggtaatcgccgtaataatgatgcaaatgaacaggcagagtggcagtttcccaaaccgcagaaggtcgtccccgatcacgccaggcaaagcatggcgctcgttgcttccaatcgaccctttaaccttgcttaaggcctctgtcactctgccgatcatgcgttcgtcctctctgcgatacgcagcactgaactacgggcgcgtggattctctgccacctcttcttcgcccggcatcaacttgcctagtgctcgcaactcacggccgcccagttttttgagctgcgcttcggtcatcggtattcccgccggaacctgcggaccgcggctttgctcacgcataaagcgcttcacaatgcgatcttccagcgaatgaaaactaatgatcgacagccgcccgcccggggccagcacgctgagcgagctttttagcgcctgctctatctcctccagttcactgtttacccatatgcgcaccgcctggaaggtacgggtcgcgggatgtttgtgcttatcttttaccggcatcgccgcggcgatgacttccgccagctctttggtgcgggtcatcggctgaatgcgattacgttcgacgatcgcgcgggcgatacgtttgccgaaacgctcttcgccaaaggttttaatcacccaggcgatatcgtcttcttcagccgtctgcagccattcggccgcggactgaccgcgcgtcggatccatgcgcatatccagcggcccgtcacgcataaaggaaaagccgcgttccgcatcgtcaagctgcggggaagagacgccgagatcgagcagaatgccgtcgatcttaccggtaagattgcgctcgccgacgtactcagcgagttgtgaaaagggaccatgtacgatggaaaagcgggggtcatcgatggtttgcgcgacggcaatcgcctgcgggtcgcgatcgatagccagcaagcgtccttccgcacccagccgggagaggatcaggcgcgagtgaccgccgcggccaaaagtaccatcaatatagataccgtctggacgaatattgaggccgttgacggcttcatccagaagtaccgtagtatgtttataattttccatcatttttataaggacaaatcctgcaggcgctccgacagttcaccggtcgcggactgctcagcgtcgatatcttccttgacccgttgataccaggtcgtttcatcccacagttcaaatttattaaactgcccgaccagcatcacttcttttgtcagcccggcatgctgccgtaacaccggcgcaatcagcaagcggccggcattatccatctgacattcgctggcatgacccaaaagcaaacgctgtacgcgccgctcaacgggattcatgctcgataaacgcgacaatttctgctcgatgacttcccattcaggcaatggataaagcagcaggcacgggtgatgaatgtcaatggtgcataccaattgaccggcagcgtcctcgatcagcccttcgcgatagcgcgttggcacggccaggcggcctttgctgtcgagattgactaacgttgctccacggaacatgccagcctcaccccttttcgccactttaccccacaaattcccaccagaaggagtttacggagcggaggaaaagcttgtcaagccagcacggatgccaacggagctcaaaaacccattatttacagccgacattagccctgatgaaaaaatcatcaacaggcgaggcaaattaacgttatgaatacgtgtaagaaaataaccaacaaactcgtaacagttataaacaacagaatatcttcggcgggaaaatataaagtgtcagtttgcgacgcgagcggcattttaggccattatgccggccgttaacagtacctgttgctggcagagggactggccaggcgcgggatatgacggggaagaaagcgtggcgcgtacaaaatgagtgttaattcagcaattaacctgatgaatgtaacaaaataatacaattaaagtccgcgcagtcattttttgtaccccatttggagtcacaaaacgatggtcagtgaataaaataaaataacgagtaaagaagtttagggatttgtctgaaatatattcagttttgcattttgcacgtcaattgcctgatttatcgccagcggcctgcttacggtcaggcctgccaggtttatacctgggcgctggcgatatggcgcccttagcggcgattcaggctaccgcgacgatagagattacggcgaatacggctaagacccggcttcggcttgcgaggttcgtcgaggctggcgaggacaatctccagcacccgctcagcgacatcgcgatgacgctgggccacggccagtaccggacactgcagaaaatcgagcagctcattatcaccgaaggtggcgatcgccagctcggagggcagtttaccctcgcgacgcaaggtcacatccattacgccctgcagcagcgggaaagaggtggtaaacagcgcctgtggcatcggatgggtttcaagccatttctcaaacagctgggccgccgcttcgcgctcatagctgttggcatagagataatgcacctcacgcggatcgtcctgccaggctttacggaagccctgttcgcgcaggaagctcaccgacagctccggcagcgcgccgagatagagcaccgtttcgccaggaaacgtccgcagctcagctgcgagcatctcggcgtcatcctggtcagcgccaaccacgctggtgaagtgctcgcgatcgagggcgcggtcgagggcgacaatcggaaacgggtcgttagcccagcgctgataaaaaggatgctccggcggcagcgaagtagagacaatgatagcgtccacctggcgctgcagcagatgctcgatgcagcgcatctcgttatcgggctgatcctccgagcaggcaatcagcagctgatagccgcgctgacgcgcctgacgttcgagataatttgcaatccgggtatagctggtgttttccagatccgggatcaccagaccgatagagcgtgtgcgtcctgcacgcaggccagcagcgaccgcatttgggtgatagttgtgctctcgcaccacagccatcactttttcgaccgttttatcgcttacgcggtactgcttcgctttgccattaatcacatagctcgcggtggttcttgaaacaccggccagccgggcgatttcatccagtttcacaattgccccttgggtaagaagtgccaaacataaccattattcaggtatggaatcctttttataacatctaagcgcagaatagttagcgcagcaaccgctttcgcttacagttcctactgatttcgcaaaaaaaaagcccgacagtctctgccgggctatttttacagcagttcccgatccttagcgcatgattttatcaccgcgagacaggccgaccacgccggagcgagccacttccacaatccgagcgacatcgcgcagcgaggccagaaatgcatccagcttatcgctggtgccggcgagctggacggtatagatagaaggcgtcacgtcgataatctgtccgcggaagatttcggtgttgcgcttcacttcttcacggccatagccgctggcctgaaccttcaccagcataatttcgcgttcaacatgagccccctgccccagctcgctgacccgcaggacatccaccagcttgtgcagttgcttttcaatctgctcaatcgctttttcatcgcccacggtctgaatggtcattctggagagagtgggatcgtccgtcggcgcgacagtcaggctttctatattatagccacgctgggaaaagaggccgataacgcgggacaatgcacccgattcgttttccagtaataccgataatatccggcgcataatcaggtcctctccgttttgctcaaccacatttcatccatgccgccgccgcggatctgcatggggtacacatgctcactgccgtcgacggtcacatcgacaaacaccagccgacgctggcgcacctgctccagagcttcagcaagcttcgtctccagctcctgcggctcgctgatgcggatcccgacgtggccataggcttccgccagacggacaaagtccggtagcgattccatataggactgcgagtgacgcccggaatagagcatatcctgccactgcttcaccatcccgagatagcggttgttgaggttaagcaccaggaccggcagctcatactgcagcgcagtggagagttcctgaatgttcatctggatactgccgtcaccggtcacgcagaccaccatttcgtccggcagagccattttgacccccagcgcagccggtaggccaaagcccatggtgccgagaccaccggagttaatccagcgccgcggtttatcgaaggggtaatacagggcggcgaacatctgatgctgacccacatcggaagtgacgtaggcatcgccctgggtcagccgccagatagtttcaattaccgcctgcggtttgattttatcgctctggtcgtcgtagcgcagacaatgacgggcacgccactgctcgatctgttgccaccagtcgcgaatgtcgtccagcggctgctgcgcttcctcctgctccagcagctccagcatctgctccagcaccagccgggcatcgccgacgatcggcacatctgccggcacggttttcgagattgaagtcggatcgatatcaatatgcagtaccgtcgcgttcggacaatacttggccaggttattggtggtccggtcgtcaaagcgaacgccgacggcaaaaatcacgtccgagtggtgcatggtcatgttggcttcataggtgccgtgcatccccagcatccccagcgcctgcgagtgtgtcgccgggaaagcgccaagtcccatcaaggatgaggccaccggcagcttcagtttttccaccagctcgcgcagctgaggttcgcaatgcgcattgatcgccccgccgccgacgtagacgaccggcttacttgcggccaccagggtctgcagggcgcgtttaatctgccctttatggccactggtggttgggttatacgagcgcatgctcactgcgtccggccagacgtaaggcagcttcttcgccggattgagaatatccttcggcagatcgaccactaccggaccggggcgaccgctggccgccagccagaaggctttcttcagcacgccgggaatatcttcggtctgcttcaccaggaaactgtgcttcaccaccggacgggaaatccccaccatgtcgcactcctggaaggcatcgtagccgataagcgaggtggctacctgccccgagaggatcaccaacggaatagagtccatataggctgtcgcaatgccagtgatggcgttcgtcgccccaggcccagaggtcaccagcaccacgccgacctccccggtcgcccgcgccaggccatccgccatatgcaccgccgcctgctcgtgacgaaccagcacatgatcgataccgccaagggtatgtaacgcatcatagatatcgaggactgcgcctccgggatagccgaatacttgcttgacgccctgatcgacaagcgattggacgaccatctcggctcctgacaacatctccatggtttgcctccaggcttattgttttacgacagcggaactcaatttccgcgcgctcgcacgatgcgaaggagtggtcctccgcattgaggtgaatgtactgcatgccactaccataactgctcgccagcaggcaggcaattcgccgcagctgaggccttatttcttgaataagaagaaaagaaagcggtgaggggaaaatatggtgaattgcttcagagataagaaaagagaatggtaaatactcggcgaaaaagggtgataacaggaatagatccatttttcacgaacacaacgaacccctcgcgcaaggtaaacagaataaaattctgctttatttgatttatgtcatataaaaaaaggagccgaagctccttgctatctatcgtcgtcgggtcagcgcttgcaaatgtccaccaacagctcttccatccactggtggcctttatcacgaccagcggcttcgtgccaggagagatagcaggtccgactgttgaccttcaacggcaaaggtaatatttgcagggcaagcttgtcagcaaattcatctgccagccagcgcggggcaatggccaccatctgggtttgcgatactacgtttaatacgctgaccatcgcattaccctgataggcgatacgcgcttgtttatcggccgtgtcataccacggcaaactaaatgaggcataccggtcgagagcaacggcggcatgctcctcgcgataaatatccgcctccatcatcggcccggaaatacgcggatggttgcgactggcgaccaggaccatttcgtctttaaataacggaacgcaggcaaactcagggcgacggaactcttcataaccgattacgaattctgtttcctgataacgtagctgatgttccgtattttgattcagcgcagacttaaagactaaatgaatattgggtgctatctctgcaactttattaaaaataaccgacgtcaggatgttatccagcgggctgcagacgcacagatggaacacgcgctcactgctcagcggttcaaaaccggagcctggcaattcgttttggaccagctgcagcgcctggcgtaccgagccaaacagctgataggcgcgcgccgtcggctgaataccgcggccatagcgcacaaaaagctcgtcattaaacatcactttcagtcgtgaaaccgcattgctcaccgcgggttgtgacatgccgagcgtatgggcggcacgagtaatattctgctcttgcataaccgcatcaaaaacggtaagcagattgagatcaaccatccgtagttgaggtttaacgacttcctgtccgggggctgatttatattctggagtttcaattaacatatctaattccgccgtcacgatgaattcccttcactaaaccgctataattagcgccgaaaatatcatttaccatgcaaatgacatttacaaaatagcaaaagaaatttttaggaatatatcaaggctatgagtggcagtgaagaaacggtcctgatcaaaaaattgagccgctcaaaccatactgattacttaatgatgataagtgtaaccataatccataaaaataaaaacagcaccacgagttaactgtaacttaagcaataataaagtattttatttttccctccataaaattaacaaatccttatcattgaaaaataatccgctagcgttcgaatacattcacaggaaaaataaatttaatattttcatccagataccgttttttgtcccttcattggcgacacctcttcgacgatgccttgaatgcaaagcactttttcaaatgaaacaaatggggataaaccgccttcggtccaaaataggatcttcggcaaaatggggcttacatcagcacattttgctaattcatttagtcagcccaaaacgctttttccatgccaggggttgactttaaaacagctatccagtaactctaaaagcataacgatttcatctggagtttgatgcaatgattcgcaccgctcgtatcaccagcctactactactaaacgcatgccatttgcgcggtaggctgttgggcgacgttcagcgttaagtcatcttccagcaagactataaaacccgcgccttggcgcgggtttttttatgctcgtcaacaaggcgccaggacacagactaaggatccaaaccatgagccagcaagtcattattttcgatacgaccttacgtgatggcgaacaagcgttacaggcaagcctgagtgtcaaagagaagctgcagatcgcactggcccttgagcgaatgggggtcgacgtaatggaagtcggtttcccggtatcctcaccgggcgattttgaatcggtgcaaaccatcgcgcgcaccattaaaaacagccgcgtgtgcgccctggcgcgctgcgttgagaaagatatcgacgtggcggcggaatcgttaaaagtggccgaggctttccgtattcatacctttattgccacctcgccgatgcatatcgccaccaaactgcgcagtacgctggatgaggttattgagcgcgcgatctatatggtgaagcgggcacgcaactacactgacgacgttgagttctcctgtgaagacgccggccgtacgccgattgccgatctggctcgcgtcgtggaagcggcgatcaacgccggcgccaccaccattaatatcccggataccgtcggctataccatgccgttcgaatatgccaacatcatcagcggcctgtatgatcgcgtgccgaatatcgacaaagcaattatttccgtccacacccatgatgatctgggcatcgctgtcggtaacgccctcgccgcggtccacgccggtgcgcgccaggtagaaggtgcgatgaacggtatcggcgaacgcgccggcaactgcgcgctggaagaagtgatcatggcgatcaaagtgcgcaaagacatcatgaacgtgcacaccaacattaatcatcatgaaatctggcgcaccagccagaccgtcagccagatctgcaatatgccgatcccggcgaacaaggccatcgtcggcaccggcgccttcgcccactcctccggcattcaccaggacggcgtgctgaagaaccgcgaaaactacgagatcatgaccccggaatctatcggcctgaaccaggtgcaactgaacctgacttcccgctccggccgcgcggcggtgaaacaccggatggaagagatgggctaccaggagagcgattacaacctggatcatctgtacgacgcattcctgaagctggcggacaaaaaaggccaggtcttcgattacgatctggaagcgctggcctttatcaacaagcagcaggaagagccagaacatttccgcctggattacttcaatgtccaatccggatccagcgatatcgccaccgcctcgatcaaactggtctgcggggatgagatcaaaaccgaagccgccaacggcaacggtccggtcgatgctatctaccaggcgattaaccgcgtcaccgactacaacattgaattagtgaagtatggcttaagcgcgaaaggccacggcaaagacgccctgggccaggtggatatcgtcgttgactacaatggccgccgcttccatggcgttggtctggcaacggatatcgtagagtcgtcagccaaagcgatggttcacgtgctgaacaacatctggcgcgccgccgaagtcgaaaaagaattgcaacgcaaagctcagaataaagagaacaataaggaaaccgtgtaatgtcgaagaattaccatattgccgttttgccgggtgatggcattggcccggaagtgatgaaccaggcgatgaaagtactggaagccgtacgccaacgttttgccatgcacattaccaccagccagtatgacgttggcggggcggccatcgaccgtcagggaactcccctgccgcaggcgaccgtcgccggatgcgagcaggcggatgcgatcctgttcggctccgttggcggtccgaaatgggagcacctgccgccggcggaacaaccagagcgtggcgcgctgctgccgctgcgtaaacactttaaactgttcagcaacctgcgcccggccaaactgtatcaggggctggaagagttctgcccgctgcgcgccgacatcgctgctaacggcttcgacattctctgcgtacgcgaactgaccggcggcatctacttcggccagccgaaaggccgcgaaggcagcggtcagcatgagaaagcctttgataccgaggtgtatcaccgctttgagatcgagcgtatcgcgcgcatcgcttttgaatccgcccgcaagcgtcgtcacaaagtgacttccatcgataaggccaacgttctgcagtcctccatcctgtggcgcgaaatcgtcagcgagatcggcaaggagtatccggacgttgagctggcgcatatgtatatcgataacgccaccatgcagctgattaaagatccgtcccagttcgacgtgctgctgtgctccaacctgtttggcgacatcctctccgacgagtgcgcgatgatcaccggctcgatgggtatgctgccgtccgccagcctcaatgaacaaggttttggcctgtacgagccggcgggcggttccgcaccggatatcgccggcaaaaatatcgccaacccgatcgcgcagatcctctccctggctctgctgctgcgctacagcctcgatgctgacgaagcggcgaccgccattgaaaacgcgatcaaccgcgccttagaagaaggggttcgaaccggcgacttagcgcgcggcacggcggcggtcagcactgatgaaatgggcgatattattgcccgctatgtcgcagaaggggtgtaatcatggcgaagacgttatacgaaaaattatttgatgcgcacgtagtgtatgaggcgcagaacgaaaccccgctgctgtatatcgaccgccatctggtgcacgaagtcacctctccgcaggcgtttgacggtctgcgcgcccatggccgccaggtgcgccagccgggtaaaaccttcgctaccatggatcataacgtctcgacgcagaccaaagacattaacgcgtccggtgagatggcccgcattcagatgcaggagctgattaagaactgtaaagagttcggcgttgaactgtacgacctgaaccacccgtatcagggcatcgtccacgtcatgggcccggaacaaggggttaccctgccggggatgacgatcgtgtgcggtgactcccataccgccacccacggcgcgttcggtgcgctggcgttcggtatcggcacctccgaagtggagcatgtgctggcgacccagaccctgaaacagggccgcgcgaagaccatgaaaatcgaagtccagggcaaagcggcgccgggcattaccgccaaagatatcgtgctggccatcattggtaaaaccggtagcgccggcggcaccggccatgtggttgagttctgcggcgaagcgatccgcgatctgagcatggaagggcgtatgaccctgtgcaacatggcgatcgagatgggcgccaaagcgggcctggtcgcgccggacgaaaccaccttcaattacgtacgcggccgtctgcatgcgccgaaaggcaaagattttgacgatgccgtagcgtactggaaaaccctgaaaaccgacgacggcgcgacgtttgataccgtggtaacgctgcaggcggcggaaattgccccgcaggtgacctggggcaccaacccgggccaggtgatctcggtgacggataacatccccgatccagcgtcgttcagcgatccggtggaacgcgccagcgccgaaaaagcgctggcctatatggggctgaaatccgggatcccgctgacggaagtcgctatcgataaagtgtttatcggctcctgcaccaactcgcgcatcgaagatttacgcgccgcggcggaaattgctaaagggcgtaaagtggcgccgggcgtccaggcgctggtggtgccgggttctggtccggtgaaagcgcaggcggaagcggaaggtctggataagatctttatcgaagccggctttgagtggcgcttacctggttgctctatgtgtctggcaatgaataatgaccgcctgaatccgggcgaacgctgtgcctcaaccagcaaccgtaactttgaaggccgtcagggccgcggcggacgcacgcacctggtgagcccggcaatggccgcggcggcagccgttaccggccatttcgccgatatccgtaatctgaagtaaggagaccatcatggcagagaaatttacccaacataccggcctggtggttccgctggatgctgcaaacgtcgataccgacgcgatcatccctaagcaatttttgcagaaggtcacccgcaccggctttggcgcgcacctgtttaacgactggcgctttctcgacgataaaggtcaacagccgaacccggagttcgtgctgaattttcctgagtaccagggggcatcgatactgctggcgcgggaaaacttcggctgcggctcctcgcgcgagcacgcgccgtgggcgctgaccgattacggctttaaggtcgttatcgccccgagctttgccgatatcttttacggcaacagcttcaataaccagctgctgccggtgaccctgagcgacgagcaggtcgacgagctgttcaagctggtgcaggccaacccgggcattacgtttgaagtggatctggaagcgcaggtagttaaagccggggataaaacctacagctttaagatcgacgatttccgccgccactgcatgctcaacggcctggatagcatcggcctgacgctgcagcatgaagcggcgatctccgactatgaacgcaagctgccggcatttatgaattaacctttgggcccggtcatttgatcgggctttttattttattgcggagaaaattgcgatctcacgcacaaaaaccaattttaatgtgctgattgtcagaccttaccgccaccctgccctaccgcctaaagaagaattattccgctttcctccccttctccagcactgtttatgtattttccctgcactgcaagtaaaaataaggcacgagtgtttaatataaaaatataagaatgtgaagaaagcgttaatctcatagagaacccctatggctatgcacaaaaaaaagcattatttttcgatttttcccctcgttatcttttgccacagagaaatattaactaaggacacgcctgggccccgcatatcggcctcccggcctcctgtggagagaagagatgagccactatccgcaccttttcagtccgttgaccatcaacggtatgacgttaaaaaaccgcattattatgccccctatgggcaccaatatggccacgctcaatggcgaggtgtcgcaggaacagctggaatactacgaactgcgggccaaaggcggcactgggcttatcaccatcgaaaatatttgtattgatttccccttcgcctccaacggcaccacccaactgcgcatcgataacgatcaatatattccacggctgtttaaattaaccgagaccctgcataaacatggcgcctgcgtatccattcagttaaatcatgccggcgcttccgcttatgcctaccgactggaaggccagacgccgctctcctcttctacaacgccgtcgaagaagcacggtaatattccgcgtccgatgacccatgaggaaatttatcatgcggtagagaaatttggtgacgccgcggagcgcgttcggcgcgcaggttttgactgcgtcgaaattcatgccggtcactcctatttaattagccagtttttatcgccgctgtttaataagcgcactgatgaatttggcggcagcgtcgaaaatcgcactcggatactgagtctgattgtcgataaggttcgcgcctgcgtggggccgcgttttccggtcagcctgcgcatcagcgccgacgacttcctcaagggcggcaataccctcgaagattccctgcgtattcttgagctctgccaggagaaggtcgatatcatcaacgtctctgcggcgcagaacgataacctgaatctgcaaatcgatcagatgtcgctggaggatggctggaagcgctatctctcccgcgcggtgcgcgataaattccataaacccacggtcatcgccggcaatattcgcactccgcaggtagccgaagatatcctcgccagcggcgatgccgatcttatcgccattggccgcggtctgattgccgagccggagtgggtgcagaaagtgcaaggcggaaaagagcgtctgatgcgcaaatgtatctcctgcaacatcggctgcgccgaccatcgcatcgcccgctcgcgcccgctgcgctgttcgattaacccggatattattcacggtgacgcctataaaatgcggcgcgtgaatcgcgacactaacgtggtggtcatcggcgccggcaccgccgggatggaagccgcctgcaccgcggcggaagttggttgccatacctggctgctggaagcgaaaaaccacgttggcggcctcgccagcgaaatctcccgcctgccggagaaaaaacgcatcgctgatttcccgcagtttatgaaaaatcgtatcgcctcgctggacaacctgatgctgcagatcggcaagcgggccgacgtggcttcagtttccgccctgcgtccgcatctgattgtcaacgccaccggctcaacgccgctgctgccgcccattgaaggcttgcgggaaaacattgacgtcgagaacggcaagatcttttccattaccggcatgatcgacaatctggcgaaatttaccgatatcaagggcaaacgcatcgccgtagtcggcgccggcgccgttggccttgacgttatcgaatactttaccgctcgcggcgcacaggcggtgctaatcgagatgcaggacgccgccggtcgcgatctcgacatcattaccaaaaatgccatgttgaccatgctcgacgagcaccaggtcgaacagcacatgaatacccaactgatggcggtcgctgccgaccatttccaggtgaaaaatacacagcaaaccttcgatattcccttcgactacggctttgtctgtctggggatgcgcgccaaccggacgggtctcgacgagatcgagcgctgggccaatgccaataacgtcaaaatcatgaacatcggcgacagcgtgatggcgcgacgcattatcgatggcgtccgcgaaggccgcaacgtactggatgcactggaagacatgggtgcgctgggcagcagcgaagcacaacgaattccctttctaacttattgaggatttttgtcatggcagaacgtattactggacacactgagctgattggcctgatcgccaccccgattcgtcacagcatgtcgcccaccatgcacaacgaggctttcgcccatctcgggctggactacgtctatctcgcttttgaagtcggtaaccaggagctaaaagacgtggtgcagggcttccgggcgatgaagctgcgcggctttaacgtctctatgccgaacaaaaccgagatttgccagtatctcgataaactgtcgccggcggcacagctggtcggggcggtcaataccgtggtcaacgacgacggcgtactgaccggacatatcaccgatggcaccggctacatgcgcgcccttagcgaagccggtatcgatatcatcggcaagaagatgaccgtactcggcgccggcggcgcggcaacggcactctgcgtccaggcagcactggatggcgtgaaggcgatctccatcttcaaccgccgcgataaattcttcgccaacgcagaagaaaccgtggccaagatccgccacaacaccgactgcgagatccatctgttcgatctcgacgatcatgacaagctgcgcgccgaaattgacagcagcgtgatcctgaccaatgccaccggggtcggcatgaagccgttcgaaggccagatgctgctacctgacgacagcttcctgcgtccggacctgatcgtctccgacgtcgtctacaacccgcgcaaaacccacctgctggaagtggccgagaaaaaaggctgccgcacgctgaacggcctggggatgatgctgtggcaaggcgcgcgcgcgttcgaaatctggacgggcaaacagatgccggttgattacatcaagagcattctgttctaagaggcgaatgatgaaaaataaatacatccctactgcggcagggctgtatctcaactacctgatccacggtatgggggtgctgttaatcaccctcaacatggcccatcttcaggaacagtggggaacagacaaagccggcgtatcgatcgttatatcttcgttaggtattggtaagttagcgaccatcgtgaccggatttctctcggatcgcttcggtcgcaagccctttatctatcttgggatccttagctacctgatctttttcgtcggcatcctgctgaccaaaaatatctatctggcttacgtgttcggcattatggcgggcctggcgaacagcttcctcgactccggtacctatccggcgctgatggaatctttcccgcactctgccagccgggccaacgtgctgatcaaagccttcgtctctgcagggcagttcctgttgccgttcattatcagcttcctgatatgggcaaatctgtggttcggctggtcgttcgtgattgcggcagcgctctttgtactgagcgggatttatctgcttaaaatgccgttccctgacagccaggcggcgaaaaaagaggaagcccctacggcacaggcggaaacagccgtccggccacaggctaataagctggatatggtgatcttcaccctgtacggttatatcggcatggcgaccttctatctggtcagccaatggctggcgcagtacggccagttcgtcgtcggcctgccctatgcctcggcgattaaactgcttagcatctataccgtcggctcgctggtctgcgtctttgtaactgccgccttcgtcaaagaggtgtttagctcggccattgcgatgattatttatactggcctgtcgatgatttcgctgctgttggtgtgcctgttcccgacgccgatgatggtgaccggctttgcttttgtcatcggctttgccgccgctggcggagtgctgcagctgggtgcgacaatcatggcgatgagcttcccgaacggaaaaggcaaagcaaccggcatcttctacaccgccggcagtatcgccagcttcacgatcccgttgatcaccgcaaagctttcgcagatcagtattgccagcattatgtggtttgattttctgatcgccgttatcggctttgtgatcgccctgtacatcggctatcgtcaactgcaggctcgggcggcgcaaaaagtgtcacgcaccgcagtcaccgcctgaagtacaacgcgaaaaataatggatacctacatgacaaatgcagtaaccgtaaagaacatcacctttcaggaaggggaaaccctcatttgtgtaccgctgatcggtaaaaccctggatgagatactgggtaacgcccacggcctggtcgatgccggcgctgatattatcgaatggcgcgttgaccactttgcccaggtcagagagatggcccaggtgatggccgcgctggcggaaatccgtggcgcgctgaaagcgcttccgctgctatttaccttccgcagtaagaaagaaggtggcgaaaccgagctcagcgacgaagcctattttgcgctcaaccgcgaggccgcacgcagtggactggttgatgttatcgatatcgaactgttcaatgatgaagcgcagatccgcgcgctggttgacgatgcgcatgccgcgggcgtcaaggtgatcatgagtaatcatgatttccataagacccccgctcaggaagatattatctatcgcctgcgccgcatgcaggatctgggggcagatctgccgaagatcgcggtgatgccgcagtcgccgcaggacgtactcaccttgctcgccgccacgctgaccatgaaagagaagtatgcgacgcgtccgctgatcaccatgtcgatgggcaaatccggtggcgttagccgggtcaccgggcgcttgttcggttcggcgatgaccttcggtaccgttggtcaggcctccgcgccggggcagatcgccatcgctaagctgcgtgaagtgatggatattctctcctgatatccggatggcccggaggtcacatccgggccatccgttaacagatcttctggctgtcgtggataaccacatttttaaatgactccagcgccggagagagccccttgtctttcatggtcgccagatagatatagcggggggggatggtgtttttaatcttcaggatatggacgttgtaataggagagcgcggtgatgcgcggcataatcgcgatcccgtagtcaatactcaccagcccggccatcgccgtatcctcatccacatagcaggcgatctccggcaccagcttttgctgcataaatacattatcgataaacggacgtaagccgctattttctgaaaaatagatatacggataatgaatcgtctccaccagatcgacttcatgttcatatagccgggccagcggatgatcctttgccgtgaccaccaccagttcctgctggatcaccggaataaaatcgatatcgggttcatcggcaatataagagcagatcgccagatcgacttttccggccttcagctcctgcaacagcgtcagcgatgtcccttgagtaaaagaaaaagtcacattgtgacattcaggtgaaagagaatatttattaattaactgtggaacaacatactcccccatcgtgtaaataaaggcgatgcgaatattctctttattctcagcgccatttttttgcaatatcatgcgtccgttctccagcgaggccagcgcatcttcaacatacggcaaaaaacgcttgccgttttgggtaatttttacgttccgcccctgtctggcgaatagcgcgacccctaactccttctccagctccgatatcgcgtggcttagcgagggctgggtgatgcacagactggaggcggcttcggtgtaatgctcagtttcagacagacgtttaaaataataaagttgctttaggttcattatttttacccgtataatataagaataaatgcactgacgctaatataccatgcaagccaccaataatgcgcatgaacgggtaaatatcggcgttacatcaaatattatttgacgaagggcatgaatgtgccacaaggcattgccattcatagatactacctatagctccttgagatatttttgcatattagaatatatgcaaaaatattttaaactttaaaggaactcgctatgagtatgtcaaactctcaggaagtcctcacttccacatcgggggcgaaaaaaagaagccgcgtacggatagttattctgctgctactctccgtcggaacgatgatcaattatctcgaccgtaccatcctgggtattgtagcgccacagttaagcaaagaaatccatatcgatccggcgatgatgggcatcatcttctccgccttcgcctggacttatgcgctggcgcagatccccggcgggatgtttttagaccgctttggcaacaaactgacctatgccctgtcaattttcttctggtcgctgtttaccctgctgcaaagtttcaccctcggcctaaaatccctgctgcttctgcgcctgggactcggcgtcagcgaagcgccctgctttccggccaacagccgcatcgtcagcacctggttccctcagcatgagcgcgcgcgggcaacggcaacatatacagttggtgaatatatagggctggccgctttctcgccgctgttatttttaattctcgaacatcatggctggagaacgctttttttcctcaccggcggattaggtattttatttactttagtgtggtggcgtttttatcatgaaccgcatgaatcgcgcacggctaatcaagcggagctggagtatatcggcgcaaacggcattaacaataaaatccagaacgttccatttaactggcgtgacgccagacgcctgctgggctgtcgccagatcctcggcgccagcctgggtcagttcgccggcaacaccacactggtctttttcctgacgtggtttcccagctacctcgccaacgagcgccatcttccatggctgcacgtcggcttcttcgccacctggcccttccttgccgccgcgattggcatcctcttcggcggctggatctccgaccggttgttgaagcgaaccggctccgtcaacatcagtcgaaagttaccaataatttccggtttattgctgtccagctgtattatcgcggcgaattgggtaagcgccaatagcaccgtaattattatcatgtcggtggctttttttggccaggggatggtcggtctgggctggaccttaatttcggatattgccccggaaaatatggcaggcctcaccggcggcatatttaatttctgtgccaatatggcctcgattatcgcaccactgataattggtgtgattatttccgccacgggtaatttcttttacgcgctgatctacgtcggcctgacggcgctgattggggtgattgcctacatttttatcattggcgacattaagcgtatcgaactcaagtaggcctggtcgccccggcgatgccggggcgagtagtcagatatccttcaccttgctggtcaaaaacagcgtcaccagcgaaatggccgcgatcgtccagtagacgctggcgtgaccatagctctgggacagcgccccctgcatcacgccggcaaggatcacgccggtggaaatactgttggtgaacagggtggtcgccgctcccgcccgtcccggcattaaatcctggaaccacagcatgcctatcccggcgataatgccgataaagatggcattgaacagctgcagagccagcagcgccgtgcgaccatgaaacaggatcagtccggcataaaacagcacgccggcggccaccgccgccaccatcattttacgtttgccaaagcgctttacgtagtagccggcgaggatcatcgccggtatctccagcccggcggcagtgcccatcaggatcccggccaggctgtcgggaagcccgagatcgctgctgatccacagcggcatatcaatgatgtacatggtgttgcaggtccacatcagggtggaggcgataaacagcatacgcacgttcttgtcctgccagccgccggcctgcgctagcgccgccgcctcctccgagggctgttccacacgcggaaccgaaggcagtttgatggcaatcagagcgaggctaatgacaaaaatgcccgccgcaatggagaacatggtggtgaagccatagttgagcgccagcataaaggccagcggcgggccaatcacccaagccagcgacagctgggcgcgcatgaccgagctgaacatcaccacttcccgcgccgagctgtcggcgtactcccgcgccagcgcgaagagctgcggcatggccgcgttggcaatggatgccagcatcacgccgcaggtgatcagcgtcagatagtggcggttgaaggcaaacagcagcgcattacccaccgccatcagacagcagaacataatcaaccgccgccggtcgccgcggctatcggagcgcttggccagccacaggctaaccaggatcccggcgatggcgtttacggtatagaacaggcccacccagaacggttgcgcccccacttcgcggctgagaaacaaactcaacgtcggcgcctgcaacgcgcccgccacgcccatcataaaagcaaccagcataaaggcggcatagacgccgttaagccgtcgtcccatcgtcatcaaccacagcatggaatgtccttaacacacgcgaagaaaacgaaaaaagccagcagaggctttctgctggcgggtgattctatactctatggatttcatgctgcaggacaaaacggttaaccattttgcgccgcgctcgcgctggccctgaaaaggtgagtcccgtagaggcgaatcacgcagcccgaacatacggcccaggaagcatcgacagcgcacctgcagtttgaaaaacgacgagtataacaccaatactcagtcacacatgatgtctgcaagtcaatgatcagaggtcgttgacgtcactccccactgcatcagttcccccagaatttcctgctgtcgtcctgccatcaggcgggccagccaggacgcttcctgcgtcgcagaaaagtagcgttggtagaacgattttgcggtagacctcatcatattcacctcctcgcttcatcgggattcattattggcttaatataggaagtaataaattgctgagttttgcgcaggagttccccttttatgtcttccggccgtctgcaacaacagttcattcgcctatggcagtgctgcgacggcaagtcgcaggagaccacccttaacgagctggcggaaatgctgagctgctcgcgccgccatatgcgcaccctgctcaatatgatggaatcccgcggctggctgacctgggaagcggaggcaggccgcggcaagcgttcgcggctaacctttctctataccggcctcgccctgcagcagcaacgtgccgaagatctccttgagcaggatcgcatcgatcagctggtgcagttggtcggcgataaggctgccgtccgccagatgctggtctcgcatctcggccgcagcttccgccaggggcggcacatcctgcgcgtgctctactatcgtccgatgaagaatttgctgcccggtagcgcgctgcggcgttcggaaacgcatattgcccggcaaatattcagcgccctgacgcgggtaaatgaggaaaatggggaactggaagccgatattgcccaccactggcagcagctgacccccacccactggcgctttttcctccgtcccggcatccattttcaccatggccgtgagctggagatggccgatgtgatcgcctctctgcagcgcagcaatgccctgccgctctattcacatatcgaacgcatcgaatcgcccaccgcctggaccctggatattcatctgcgccagcccgaccgctggctgccctggctgctggggcaggtgccggcgatggtgctgccgcaggagtggcagaccatgaaccacttttcctccatgccggtcggcaccggcccctatgccgtggtgcgtaacaaccagaatcagctcaagatccatgcctttgaggactattttggctaccgggcgctgatcgatgaggtgaacgtctgggtgctgccggagattagcgaagagcccaacggcggcctgacgctgcagggcaataccgaaagcgaaaaagcggtagagagtcgcctggaagagggctgctattacctgttgttcgactcgcgaagcccgctgggggccaacgacgcggtgcgccgctggctaagctatctgtttcagcccgccaacctgctctaccatgcgggcgaacactaccagggcaactggtttcccgcctacggcctgctgccgcgctggcatcacgccagcaaccacgcctgcgagaagccggcggggctggagacagtcacccttacctactaccgcgatcacgtcgaacatcgggtgatcggcgggatcatgcgcgacctgctggcggcgcatcaggtaaagctggagatccaggagctggagtacgatgcctggcatcgcggcgaggtggtcagcgatatctggctcaacagcgtgaacttcaccttaccgatcgaattttcgctcttcgcctatctgtacgaagtcccgctgattcagcgctgcattcccattgactggcaggcagacgcctgccgctggcgagcaggagagtttaatccggccacctggagccagcggctgctggccgggcaacatatcgtgccgctgatccaccactggctgatgattcagggtcagcgcagtatgcgcggcgtgaggatgaataccctcggctggttcgattttaaatccgcatggtttgcgccgccggagccgtaagcgctttccgtcatctgacaaaatcattacactaaggccgttctcaacggggtgctaataaacatacgcaatatcattcaagttgcatcaaggcagcaagcgggtgaatcccctggagcatagataactatgtgactggggtgaacgcgcgaagctaacgcagatgcggcttgaaggatgaagcgtatgggctgagaaaatacccgtcgaacctgatccggataacgccggcgaagggatttgaggctcactcaaaatcctttgccaccccttttttctgaggtgcaaagtgttgaaaaaattactcccgctgctggcgctggtcgccatgcccgctttggctaagcctgttcttaccgtctatacctatgactccttctctgccgactggggccccggcccggcggtcaaaaaagcctttgaagcggagtgcggctgcgagctgaagttcgtcgcgctggaagatggcgtttcgctactgaatcgcctgcgcatggaaggcaaaaacagcaaggccgacgtcgtgcttggccttgataacaacctgctggaagccgcggcgcagagtaaactgtttgccaaaagcaacgtacccgccagcgcggtcagcgtgccgggcggctgggataatgacacctttgttccctacgactatggctatttcgccttcgtctatgacaaaaacaaactggctaatccaccgaagagcctgaaagagctggtcgagggcccgcaaaaatggcgggtcatctatgaagatccgcgtaccagcaccccgggactgggcctgctgctgtggatgcaaaaggtctatggcgatcaagcgcccgaggcctggcagaagctggccgcgaaaaccgttaccgtcaccaaaggctggagcgaagcctatggtctgttcctgaaaggggaaagcgacctggtgttgagctataccacctcgccggcctaccacatgattgaagagaagaaagacaactatgcggcggcgagcttcgccgagggccactatctgcaggtcgaagttgccgcgcgtaccgccgccagcaagcagccggaactggcggaaaaattcctcaaatttatggtatctcctggcttccagaacgccatccctaccggcaactggatgtatccggtgaccaaggtcaccctgccggccgggtttgataccctggtgaagccgcagaccaccctgtcctttaccccgcagcaggtcgccagcgagcgtcaaacctggattagcgcatggcaacgcgccgtcagccgctaaaccttcgcgggctgatgccgggcctgttcgccgctacgctgctgtgcgctgtcgcgctggcggcgtttctggcgctgtggtttagcgcccccggcgcgggctggcaatcggtcttcagcgatagctacctgtggcatgtggtccgcttctccttctggcaggcgtcgctgtcagcgctgatctcggtgggaccagccatctttctcgcccgcgcgctttaccggcgtcgcttcccgggccgtacgctgctgctgcgcctgtgcgcgatgaccctgatcctgccggtgctggtggcggtgttcggtatcctcagcgtctatggccgccagggctggctggcctcactatttcacgcgctcggctggcaatgggagttctcgccctacggtctgcagggcatcctgctggcgcacgtctttttcaatatgccgatggcgacccgtctgctgctgcaggcgctggagaacattcccggcgagcagcggcaaattgccgcccagcttggcatgcgcggctatgccttcttccgcctcgtcgaatggccgtggctgcgccggcacattcccgccgtcgccgcgctgatttttatgctctgcttcgccagcttcgccaccgtgctctcgctgggcggcggcccgaaagccaccacgatcgagttggctatctaccaggcgctgagctttgactacgatccggcgcgagcggcaatgctggcgctgatccagatgctctgctgccttgggctggtgctgcttagccagcgtctgagtaaagccgtcgccatcggcgtcagccatgtgcgcggctggcgcgaccctgacgatcgcctgcatagccgcctgagcgacgggttgctgatcggcgccgccctgctgctgctgctcccgccgctgctggcggtcatcgtcgacgggatcaaccgtaatatgctggacgtgctggcgcagccagcgctctggcaggcattgagcacctctctacgcatcgccatcgccgccgggctattgagcgtgaccctgacgatgatgctgttatggagcagccgggagctgcgctctcgccagcggccgttggccgggcaggcaatggagctgagcggcatgctgatccttgcgatgccgggaattgtgctggcgaccggcttcttcctgctgctcaataacactatcggcctgccggagtccgccgacggcatcgtcatcttcactaatgccctgatggcgatcccctatgcgctgaaagtactggaaaacccgatgcgcgacattgccgcccgctacagcatgctgtgccagtcgctgggtattgaaggctttgcccggctgcgggtggtcgagcttcgcgctctccggcgcccgctggcccaggcgctcgccttcgcctgcgtactgtcgattggcgatttcggcgtggtggcgctgttcggcaacgaggcgttccgcaccctgcctttctatctgtaccagcagataggcgcctaccgcagccaggacggggccgtcaccgccctgctcctgctgctgctctgtttcttgttgtttacgctgattgaaaaacttccggggcgtgatgctaaaactcaatgatgtgacctggctataccagcatctgccgatgcgcttcaccctcgacgtcgcgcgcggggagcgcatcgcggtgctcggtcccagcggcgccggaaagagcaccctgctgaatctgatcgccgggtttctgccacccgccagcggcagcctgctgattaacggcgaggcgcataacgcgacgccgccggcgcagcgtccggtctcgatgttgtttcaggagaataacctgtttaaccatctgaccattcgacaaaatatcagcctcggcatccacccaggccttaaactgagccgcgagcagcaggcgcaggtcacggcgatagctggacagatgggaattgatgcgctgctggaacgtctgcccggcgagctctccggcggtcagcggcagcgcgcggcgctggcccgctgtctggtgcgccagcagccggtgctgctgctggatgaacccttctcggcgctcgatccggcgctgcgccaggagatgctgtccctggtcgccgatgtctgcgagcagcagcagctcaccctgctgatggtctcccacagcgtagaggacgccgcgcgcatcgcgccgcgctcgatggtggtcgccgaagggcgcattgtctgggatggcgccaccgccgagctgttaagcggccacagcagcgcctcgcatttgatggggatcagcgcgcgatgaccttgtgcaggatcgccagatagaccggcatcagcggatggcggaagacaaatgttaacgctgtagccgccagcgcgaccatcagcggcgacagccacagcagtcggccgcgcggcagccagcgggtcagccgatcgcctgaggttttcgcgctccgccacagccgccagcacagccatcccgccagccaggccagcagcgccgcccccaatagcagccatttaaagctggcgctgttttcatcagccggaatatcaatcgccgccccggcgaggatgcccggaaggaaatagagcggcggccagagcaggcagccgataatattcggtagcacgaacttggccaccggcaggtcgagcatcccggcgaccattggcaccagcggacgcgtcggtccgacaaagcggccaatcagaatggtgatcatgctgtgctgatgcagcgcatgctcggttttctccagcagggcgcggtttttcttcataaacgaccagcggtgcaacggcttcttaaagcgccagccgagccagaatgagatccagtcgcccagcaggcagccgacaatccccgccagccacgcctgccagaagttaacttcgccgccgccgatgagcgccccaaggccagccatcatcaccgtgccgggtaagataagccccaccagcgccagcgactcgagaaaggccaccagcatcacggctaacaatgagtagaccgtggattgggtaataaagtgttcgagcaatgcttgcataatgtacccggttaaaaaacgaagcccggattctccgaagccatcgcgccgtcgtcaagccatcaattgtcttaatagtttactggctgtgacatttaagcgggtcatcatttcactttctttactttttattcacaacccgcgcggaattcgctcgggctggccccggtgcattttttaaacacgcgggaaaaatagagctgatcttcgaagccgacgttgcgcccaacggtggcgatcggcatccgcgtggtgctgagcaacagtttggcctggctgatgcgctgatcctcccgccagccgaggacgctgacccccagctgctggcggaacaggtgcgacagacgcgagggcgacaggcagacgtgctgggcgacgctggcgatatcaaaatggctgtccgccagatggtcgctgatgtactggcaggcgtcgcgcacccggttgtccagcggcggatgcagcgattcgttgatcgcctccatgcgccgcagcagcagctgttccagcaggtttatcgccaacagttcggaatagcgcccagccccctgcccggcatcaacgatctggccgaacagctcgccaaagcgcgcctgccactgttcatccggacggaaaaagccggtctgggcaaaaatcgttggccagttgagccactcgtgccagtaggcgcgcgggcggaagtagacccactggtgataccactcgctggcgtcgggatggcggccatagtgatgaatttccccgggcgggaacagcagcatatcgcccggccggcagacaaactgttcgccgtggttgttgatcaccccctcgccgcggatcgtcagattgagaatatagcctttcatacccagcgggcggtcgataaagaaatccaggtatccctgcgcctcaatcggcgtcaggccggtgaccagatgagcgttaaaagagtagcccggcagcagcggatcgttttgcgtttcggccatacgcgtggttctccccgaaggtatcagtggcaccaattgtccatattcatcattttatcgctctcggccctgtcgcgactgcgacggcggtgggaatttggcgaaaaacccgcacagcaagcgaaaaaagcgccagcagcgtgcattccaccgtgatatgccgggtaacaaaagtgtctataaatacggcagaaaagtccacatcgaatatttgcacggcgtcacactttgcaaggtaacagcaaaataatccataagattagcgaatccggcctgacggattttgccggggatatctactgttgctgcatgaatgatttctgcatggagtaacaagatggcaattgcgattggcctcgactttggtagtgactcagtccgcgctctggcggtggaatgcgcgtccggcgcagagctggcgaccagcgtggagtggtatccgcgctggcgggaaggacagtattgcgatggcgctaacaaccgcttccgccatcacccgcgagattacatcgagtccatggaagcggcgctgaaaagcgtgctcgcttcgctgagcgccgaacagcgcgccgacgtcgtgggcattggcgtcgacagcaccggctcaactccggctcccgtcgatgccgagggcaacgtgctggcgctgcgcgaagaattcgctgacaaccctaacgccatgtttgtcctgtggaaggatcacaccgcggtcgaggaagccgaggcgatcacccgcctgtgccaccagccgggcaaagaggattactcgcgctatatcggcgggatctactccagcgaatggttctgggccaaaatccttcacgtcacccgcgaagatagcgccgtcgcccaggcagccgcctcgtgggtagagctttgcgactgggtgcccgccctgctctccggtactacgcgtccgcaggatctgcgccgcggccgctgcagcgccggacataaatcgctgtggcatgagagctggggcggtctgccgccggccagcttcttcgatgagcttgatcccatcatcaaccagcatctggcctggccgctgttcaccgatacctggacggccgatgtgccggtcggcacgctgagcgcagagtgggcccagcgcctgggtctgtcgcagaccgtggccatctccggcggcgccttcgactgccacatgggcgccgttggcgccggcgcgcagcctaacgcgctggtgaaagtcatcggcacctccacctgcgacattctgatcgccgataaagagagcgtcggcgagcgcacggtcaaaggcatctgcggccaggtcgacggcagcgtggttccacactttatcggcatggaggcaggccagtccgccttcggcgatatttacgcctggtttggccgcattctcggctggccgctggagcagctggctcagcagcagccggcgttgcgcgagcaaatcaaagccagtcaaaaacagttactgccggcgctcaccgaagcctgggccaacaatccatcgctggagcatctgccggtggtgctcgactggttcaacggccgccgcacgccgaatgccaaccagcgcctgaaaggggtgatcaccgaccttaacctggccaccgacgcgccggcgctgttcggcggtctgatcgccgccaccgccttcggcgctcgcgccattatggagtgcttcaccgagcaggggatcccggttaacaacgtcatggcgcttggcggtatcgcgcggaaaaaccaggtcatcatgcaggcctgctgcgacgtgctgaaccgtccgctgcagattgtcgcctccgatcagtgctgcgcgctgggggcggctatcttcgccgccgtcgccgccggcgtctatgaggatattccagccgcccaacagcggatggcaagccaggtggaaactaccctgcagccgcgtccggcgcaggcacagcgtttcgaacaactctatcagcgctaccagcagtggtcggtcagcgcggaacaacactatctcccttcggctgcaaaggcggaaaaagccccgcaatctcaggcagcgctcacccattaaggatacgaaaatgacgatttttgataactatgaagtatggttcgttattggcagccaacatctgtacggcccggaagccctgcgccaggtgacgaagcatgccgaacatgtggtgaacagcctgaatgcggaagccaaactgccgtgcaaactggtccttaagccgctgggcaccaccccggacgagatcacccatatctgccgcgacgccaactacgatgacaaatgcgccgggttagtggtctggctgcataccttctcgccggcaaaaatgtggatcaacggcctgaccatcctcaataagcctctgctgcagttccatactcagtacaacgccgcgctgccgtgggacagcattgatatggactttatgaacctgaaccagaccgcgcacggcggccgcgagttcggcttcatcggcgcccgtatgcgccaacagcacagcgtggtcaccggccactggcaggataaagaggcccaccagcgtatcggcggctggatgcgtcaggcggtctccaaacaggatacccgtcatctgaaagtgtgccgtttcggcgataacatgcgcgaagtggcggtgaccgacggcgataaagtcgccgcgcagattaagtttggcttctcggtgaacacctgggcggtcggcgatctggtgcaggtggtgaacagcatcagcgacggcgatatcagcgccctggtcgatgaatatgagagcagctaccgtctgaccccggcagcgcaggttcacggcgagaagcgccagaacgtgctggacgccgcgcgcattgagctggggatgaaacgcttcctcgaacagggcggtttccacgcctttaccaccacctttgaagatctccacggcctgaaacagctcccgggtctcgccgtacagcgcctgatgcagcagggctacggctttgccggcgagggcgactggaaaaccgccgctctgcttcgcatcatgaaggtgatgtcaactggtctgcagggcggcacctcctttatggaggattacacctaccacttcgacaatggtaacgatctggtgctcggctcgcacatgctggaagtgtgcccgacgatcgccaccgccgagaaaccgatcctcgacgttcagccgctgggcatcggcggcaaagcggatccagcgcgcctgatcttcaatactcaaaccggcccggcgatcgtcgccagcctgatcgacctgggagaccgcttccgtctgctggtcaataccatcgaaaccgtcccaacgccgcacgatctgccgaagctgccggtggccaacgccctgtggaaagcgcagccggatctgcgtaccgcgtcggaagcctggatcatcgccggcggcgcgcaccataccgtcttcagccatgcgctgaacctcgacgatatgcgccagttcgccgagctgcatgatatcgagctgaccgtcatcgacaacgatacccgtctgccgtccttcaaggacgcgctgcgctggaatgaagtgtattacggttcaaaacgctaagaggccgtcccctcacccttcccctctccccgttggggagaggggaccgaccgggcgccatgccgcctttctccctctcccgccgggagagggtcggggtgagggatacccgactcgcctgctattcggagcacactatgttagaagatcttaaacgccaggtgctggaagctaacctggccctgccaaagcataatctggtgaccttaacctggggcaacgtcagcgccgtcgaccgcgagaaaggggtgttcgtgatcaaaccctccggtgtggattaccgcgtgatgaccgccgacgatatggtggtggtcagtctggagagcggcgaagtggtagagggtaataaaaagccctcgtcggataccccgacccatcgcctgctgtatcaggccttcccgacgctgggcggcattgtgcatacccattcgcgccacgccaccatctgggcgcaggccgggcaatctattcccgcgaccggcactacccatgccgactacttttatggcccggtgccctgcaccaggttaatgaccgatgcggagatcaacggcgactatgagtgggaaaccggcaacgtgattgtcgaaaccttccgccagcagggaatcgacccggcgcagatgcccggcgtgctggtccattcccacggcccgttcgcctggggcaagaacgccgaagacgcggtgcataacgccatcgtgctggaagagatcgcctatatggggattttctgccgccagctggcgccgcagctgccggctatgcagcagaccctgctggataagcactatctgcgtaagcacggggccaaagcctactacggccaataatcaccctgctcgcgctgcgcttagcagggccagggctctgcgccatctggtagccgggataaggcgcaagccgcaatccggagcaacattagcgccgaacacctgtataaaaccccagcacccctcatgaaaccaggctataatcaggcctggttttttatcggcgagaatacccgtgacccagccacgagcaggatttttactcacccgtcactggcgggacactccgcagggcaccgagctctccttctggctggccaccgacgacggtccgctgcaggtaaccctcccgccgcaggagtccgtcgcctttattcccgaagcgcagcgggcgcaggctgaacggctgctgcagggggagaaagggctccgcttcgccccgctggccctgaaagatttccaccgtcagccaattgttggcctctactgccgcgcccatcgccagttgatgcgtctggagaagatgctccgcgacagcggcgtcaccgtttacgaaggcgatatccgcccgccggagcgctatctgatggagcgctttatcaccgccccggtgtgggtggaaggcgaaacgcgcggctcgcagctggtcaacgcacgcatgaagccgaaccctgactatcgtccgccgctgaaatgggtgtcgctggatatcgaaaccagccgccacggcgagctgtactgcatcggtctggaaggctgcggccagcgggtggtctacatgctgggccccgaaccggaaacgccgccagacgtcgacttcgagctggtcttcatcgccagccgtcccctgctgctggaaaagctcaacgcctggtttgccgaacacgaccccgacgtgctgatcggctggaacgtagtgcagttcgatctgcgcgttctgcaaaagcacgccgaacgctatcgcatcccgctgcgactcggccgcggcaacagcgagctggagtggcgtgagcacggctttaagaacggcgtctttttcgcccaggccaacgggcggctgattatcgacggcatcgacgcgctaaaatcggcgttctggaatttctcctccttttcgctggaggcggtggcccgcgagctgctgggagaaggcaaagccatcgacaacccatgggatcggatggatgagatcgatcgccgctttcatgaagacaaaccggcgctggccatctataacctgcaggattgcgagctggtgacgcggatcttccacaaaacggagatcatgccgtttttgctcgaacgagcgacggtcaacggtctgcccgccgaccgccacggcggctcggtcgccgccttcagccatctctatttcccgcgcatgcaccgcctgggctacgtggcgccgaatctcggcgacgtaccgccgcaggcgagccccggcggctacgtgatggactcccgccccggcctgtatgactcggtgctggtgctggactataaaagcctgtatccgtcgattattcgtacttttttaatcgatccggtcggcctggttgaagggctggcgcaacccgatgaccagcacagtatcgagggcttcctcggcgcccgcttctcgcgagataagcactgcctgccggggattgtcagccagatctggcacggccgggatgaagccaaacgccagcacaataagccgctctcccaggcgctgaagatcattatgaacgccttttacggcgtgctggggaccagcgcctgccgcttcttcgacccgcgtctcgcctcgtcgatcaccatgcgcggccatgcgatcatgcgccagaccaaagcgttaattgaagccaaaggctatgacgttatctacggcgataccgactccaccttcgtctggcttaagcgcccgcacagcgaagcccaggcggcggagatcggccgcgagctggtcagcgatgtcaacgcctggtgggcgcaggagcttagcaaaagccagcttaccagcgccctggagctggagtatgaaacccacttctgccgctttttaatgccgacgatccgcggcgccgataccggcagcaagaagcgctatgccgggatgattcaggagggcgatgcccagcgcatggtgtttaaggggctggaaacggtgcgtaccgactggacgccgctggcccagcagtttcaacaggagttatacctgcgcatcttccgcaaccagccgtatcaggattatgtgcgggagactatcgccaggctgatgaacggcgagctcgacgaacagctggtttatcgcaaacgcctgcgccggccgctggcggagtatcagcgcaacgtaccgccgcacgtgcgcgccgcccggcttgccgatgaacacaacctgaagcttgggcgggcgcagcagtatcagcagcgcggcaccatcaaatacgtctggaccaccagcggcccggagccggcggattaccagcagtcgccgctcgattacgatcactatttaacaaagcagttgcagccggtggcggaagggatcctgcccttcgtcaacgatgactttgctacaatagtgacaggacagttggggctattttgatttttggtcacccattccacgggcacgaaagcctaaaaatgaagcgtgaggagaacgtgacgaacgttctgccatccagtaatatagcgccctttccattcctggccccaattttgacgcatctccgattgttcatggagatgatcaactattgcctgcaattaaagaactaaagagccgaacatatatgccttttacacttggtcaacgctggattagcgacacagagagcgaactaggattagggacggtggtagcgctggatgcgcgcatggtcactctccttttccccgccatcggcgaaaaccgtctgtactctcgcaacgattccccgatcacccgcgtaatgtttaacccgggcgacaccatcaccagccatgaaggctggcagctccacgttgacaaagtgaatgaagagaacgggctgctgtcctacactggcacccgcctggacacccaggaagcgaacgtcaccctgcgtgaagtgctgctcgacagcaaactggtattcagcaaaccgcaggaccgcctgttcgccggccaaatcgaccgtatggatcgctttgccctgcgctaccgcgcgcgcaagttccagagcgaacagtaccgcatgccgtggagcggcctgcgcggccagcgcaccagcctgatcccgcaccagctgcatattgcccacgatgtgggccgtcgtcacgcgccgcgcgtcctgctggccgatgaagtgggcttaggtaaaaccattgaagccgggatgatcctgcaccagcagctactctccggcgccgccgagcgcgtgctgatcgtggtcccggaaaccctccagcaccagtggctggtggagatgctgcgccgtttcaacctgcgtttctcgctgttcgacgacgagcgctacgccgaagcgcagcacgatgcctacaatccgttcgaaaccgaacagctggtgatctgctctttagacttcgtgcgtcgcagcaagcagcgcctggagcacctgtgcgacgccgagtgggacctgatggtggtcgacgaagcgcaccacctggtgtggagcgaagaggcgccgagccgtgaatatcaggctattgaacagctggctgagcgcgtgccgggtatcctgctgctgaccgcgacgccggaacagctgggaatggagagccattttgcgcgcctgcgtctgttggatccgaaccgcttccacgattttgaacagtttgtcgaagaacagcagaactaccgtccggtggccgacgccgtcgcgctgctgctggcgggcaacaagctgagcgatagcgaactcaataccctgggcgatctgatcggcgagcaggatatcgagccgctgctgcaggccgccaacagcgatcgcgaagatgcccaggccgcgcgccaggagctgatctcgatgctgatggaccgccacggcaccagccgcgtgctgttccgtaatacccgtaacggcgtcaaaggtttcccgaaacgcgagctgcacaccattcgtctgccgctgccgacccagtaccagacggccatcaaagtgtccggcattatgggcgcgcgcaaaaccgcggaagagcgcgcgcgcgacatgctctatccggagcagatctatcaggaatttgaaggtgataccggtacctggtggaacttcgacccgcgcgtcgagtggctgatgggctacctgaccagccatcgctcgcagaaggtgctggtaatctgcgctaaggccgccaccgccctgcagctggagcaggtgctgcgcgagcgcgaaggcatccgcgccgcggtgttccatgaagggatgtcgattatcgaacgcgaccgcgccgcggcgtggtttgctgaagaagacaccggcgcccaggtgctgctgtgctccgagatcggctccgaaggacgcaacttccagttcgccagcaacctggtgatgttcgacctgccgtttaacccggatctgctggagcagcgtatcggtcgtctcgaccgtatcggccaggcgcacgatatccagatccacgttccgtacctggaaaaaaccgcgcagtcggtgctggtgcgctggtatcacgaagggctcgacgccttcgaacatacctgcccgaccggtcgcaccgtctacgacagcgtgcacgatgaactgatcaactatcttgcggcgccggaatccaccgacggctttgacgatctgatcaaatcctgccgccaacagcatgatgccctgaaggcgcagctggagcagggccgcgaccgtctgctggagatccactccaacggcggcgagaaagcccaggccctggcggagagcatcgaagagcaggatgacgacaccagcctgatcgctttctcgatgaacctgttcgatatcgtcggcatcaaccaggacgaccgcggtgaaaacctgatcgtcctcaccccttccgaccatatgctggtgccggatttcccgggcctgccggaagacggttgcaccatcaccttcgaacgtgacgtggcgctgtcgcgtgaagatgcgcaatttattacctgggaacacccgctgatacgcaacggtctggacctgatcctttccggcgataccggcagcagcaacatttccctgctgaagaacaaggcgctgccggtcggcaccctgctactggagctgatctatgtcgtcgaagcgcaggcgccgaagcagctgcagctcaaccgcttcctgccggcgaccccggttcgcatgctgctggataagaacggcaacaacctcgccgcgcaggtggagttcgaaagcttcaaccgccagctgagcgcggtcaaccgccataccggtagcaagctggtcaatgcggtgcagcaggacgttcatgcgattctgcagcagggtgaagcgcagatcgccaaagcggcgcaggggctgatcgacgcggcgcgtaacgaagccgatgaaaagctgacggcggagctgtcgcgtctggaagcgctgaaggcggtgaacccgaacatccgtgacgacgaactggcggcgatcgaaagcaaccgtcagcaggtgatggatgcgctggcgcaggccggatggcgtctggacgcgctgcgtctgatcgtcgtcactcaccagtaacggaacgcgaacatggcgatggaaaactacaatccgccgcaggatccctggctggtgatcctgtatcaggatgagcacatcatggtggtcaacaagccgagcggcttgttgtccgtccccggtcgtcttgaggagcataaagacagcgtgatgacgcgcattcagcgcgacttcccgcaggccgaatcggtgcatcgcctggatatggccaccagcggcgtgattgtggtggcgctgaataaagccgccgaacgtgaactgaagcgtcagttccgcgagcgcgagccgaagaagcagtacgtcgcccgcgtctggggccatccgcagccggcggaaggcctcgtggatttaccgctgatttgcgactggccgaaccggccaatgcagaaggtgtgctatgaaaccggcaaagcggcgcaaaccgaatatgaggtgctggagtacgcagaggataacaccgcccgcgtgcgcctgaagccgattaccggacggtcgcaccagctgcgcgtgcatatgctggcgctggggcatccgatccttggcgaccgcttctatgccacgccggaggcgctggcgatggccccgcgcctgctgctgcacgccgagacgctcaccatcacccatcctgcctacggcaacgcgatgacctttcgcgcgccgatcgacttttaacgctcatacttcgagttgcatgcgggttggctgcgtgcaactcggattagtgaggatacagaaaacaatcccgattaatcgcgggcgaaccacgcgtcaatcatctgctcaacgcgggcgacgacgagatcggtgtcgtgacgacggctgcgcgcacaggcgtgcgccggctcatcgcacagcaggcagcggcgctgcgattcgcccagcgactggcgtcccaccagcccgttctgcggacagattacatcgatatcccacaggcgtcccagcggatggctctgctccagcgtactgcacatcgctttgatttcgctggccggatgcgctacgcaccacagcgcttctggcccggtcggcagccatagcacctgacgatccagcgtttgccagcggtgcttccacagcagctgatcgcaggcctggagggcaacgcccatcatattgcgatagcgaatgctgtccttcaccgcccccggggtcaccagggtcagggaaataacaggctgctgataatgggccaaccagtcggcctggcgggctgcacgctgctctttcgccgccagcaatgcgtcgatgctgacgcccgcctgggcgggagtatccactgacattaattcctctcctacatatgataaatacgacagcgcctggactgtcatgatgatggttgcgatagccgatcgcgcgctgattgtaacgctaaatgcggagcatttaggatacagaacgcagatattttcggcgttctgtagcggaaaatagcagatttatcgctgagcgtagcgttatatcacgccagatagtggctgaggaacagcaaccccagcgagacatttatcgccccgccgatgcgggtagcgatctgcgcgaacggcatcaggctcatgcggttgccggcggtcaggatcgccacatcgccggtgccgccctgcccgctctggcaacaggaaacaatcgccacatcgatcgggtgcatccctatctttttaccaaccaggaaaccggtcgccaccagcgcggagacggtactgacgatcaccagcaggttggttaaagtgaaggcgtttaccagttcctgccacggagtgatcgccacgccgacggcaaagaggatcgggtaggtgactgcggtgcggaagaatttatacaccatctgcgacccctcctgcagacgcggagacaccacgttagccagctttaacagtaccgcgaggaacagcatgcctaccggcgccggcagaccaatcagtttgtggccgagcatccccatcatatacagcagtaccgccagcagcgcgccggaggcgagggtcccaacgtcggtcttaccgctcacgccttcgctctcgctgaggctgcgggtttcatggctgcggttcggcatcagttgcccttcgccggtcagatgcgggaagcgcttgccgagctggttgaggcagccggagatgacgatcgccgtcaggctgccaagcatcaccatcggcaatacccggcccagggccacgccctgctccatatgcatcagcgcggcataacccattgacagcgggatcgccccctctcccacgccgccggccataatcggcagcacgataaagaagaacacctggaacggctccatgcccagcagcgtgccgacgccgatgcccaccagcatgccgaccacttcgccgcacagcatcgggaagaagatcttcagaaagccctgaatcagcgtggtgcggttcatactcatgatgctgccgacaatgatgcagcagatatagagatagaggatgttagtggatttatagaatttggtcgtggattcaataaccacgtcaggcagcagaccatagtggaccagcgcggaaggaataaaggtggcgcagatcgccgccgcaccgagtttccccagcaccgggaggcgtttaccaaactcgccgcaggcgaagccaaagaaagccagggtggccaccatcaccacgatatcgctcggcagtttgccgccaaggcagtcgagggcaatcagtcctccggccagcagaaacagcggcagcgggacgatccccaccttccagttatccataatatgccaccagcgctgcttgagcgtggttttcggcgtatcgatcggttcaagggttgcagagaatgcattgtctgtggtgctcataaattcagccctgtcgttattattcattttcagcgtaaagggacagcggcgtcgttaatgtgaagcttcccagattaaaaaagaagttttaatggtcactatggtttttatggtttctattcgctgaactgcccgggagtgatatatctctgatttatgactgtggtttttatggtttttatttcccgccggccgcctatttccgccgcgaccgctggcggcagcccgcgcctgcgccgctgatcacaactttcccttaacatttacgtcacgtgacagaaaaatgttagagtgccggtatggttaatacgtcgtccggggcctatgaaattatcttttcaatataagctgtttatttctctggtcgcttttttctcggtcctttttatcgcgctgggcatttattattattttgacgccagccgccagctttatcaggagatgagcgcccgggccaaaatacaggccgaagagatagccctgatgccgaatttacgtcaacaggtcagccggcacgacccacaggcgattcaggcgtttatgcagcaaatcgccgcccatagcgacgccagctttatcgtcatcggcgaccgtcagggagttcatctgtttcattccgtccatccggagtgggtcggcacccgactggtcggcggcgacaaccaggcggtactggaaggaaaatccatcaccaccattcgcaaaggcggcctcggggtctcgctgcgcagcaaaacgcccatcgttgatgacgcagggcgagtgatcggtattgtctccgtcggctacctcaccagctatctcgacagcattactctgactaaagtgatcaatatttttatcgccgccgtcctgctgctcatcgccctgtttatcttctcctggtactttacccgcagtatcaagaagcagattttttcgctcgagccgcgggaaattggcctgctggttcgccagcaaaaggcgatgatggagtcgatctttgagggggtgatcgtcatcgatcgccagcggcgtattgaggtgataaaccatgccgcccgcagcctgctggggctcagccagcccgcccgccagctgcgcggtcagtcgatcgacagcgtcatttcgccgcagccctttttcgccagcggcgacatgctcgaacgcgatacccacgatgagctgtgccgcttcaaccagttgaccgtgctcgccagtcgggtgcgcattatgctggagaataccctgcagggctgggtgatcacattccgtgaccgcaatgaaatcaatgccctcaccgcccagctgagccaggtgaagcgctatgtcgacaatctgcgcatcatgcgccacgagcagctcaaccggatgactaccctctccggcctgctgcatatgggccattatgacgaagcgatccgctatattcaggcccagtcggaacatgctcaggagctactggactttatctcctcgcacttccactcgccgacgctatgcggtctgctgctcggcaaagccacccgcgcccgcgaaaaaggcgtggcgctgagcttcgacccggcctgccgcatcgaccgccccctgccgtcgctgatggaatccgagctgatctccatcatcggcaacctgctggataacgccatcgaagccacgcagcgtgccgagctgccgcatgagccggtggaagtcctgatccagctcaacgcccgggagttgattatcgaagtggccgaccgcggcgtcggcatccgccccgatatccgcgagcgcatttttgaacgcggcgtcaccaccaaaacccgtggcgatcacggcattggtctgtatcttattgaacattatgtcactcaggcgggcggcaccatcgaagtcgccgataacgcgccgcggggaacgatcttcaccctatttatcccggccgacgcgcacgcctgtccgcaaccggaggcccacgatgcatcatgacctggtcgatgtgctaatcattgaagatgagagcgaactggcgcgcctgcacgccgagcttgtgcaaaaacacccgcgactgcggctggcaggcatggcggcctccctcgcccaggcgcggcagctgcttcacgccacgccgccgcagctggtgctgctggataactatttaccggacggcaaaggcgtcacgctgatgaccgacccggcgctggcgaccagccaatgctcggtgatctttatcaccgccgccagcgatatggaaacctgcagccaggccatccgcaacggcgccttcgactatatccttaagccggtatcatggaagcggctgagccagtcgctggagcgctttatccagttctacgatcagcaacgggagtggaaaatcgtcgatcagcaaaacgtcgattccctctatcaactgcaggcgaagaactatcgcgtggatagcggcagcaaggggattgaagagaaaacgctggcgctggtgcagggactgtttagcggccgggaagcgcactgtttttccgttgatgaagtggtcagcgccgccgggctcagcaaaaccaccgcccgtcgctatctggagcacggcgttgagaccggttttctggaagtggagatgctgtacggaaaaattggccatccgcggcggctgtatcgccgcgctaaggtcaaaagttaaaacccctcgccggacgggaggggctggaaacgtcagaagccgcgctgctctttgatcagctcccaggccttctggatctcctgggccttctgtttggccatctccatcatctccggcggcagacctttcgctaccagcttgtccggatgatgttcgttcatcagcttgcgataggcgcgcttcaccgtcgccgcgtcgtcggtcggttttactcccagcacattgcaggcatcttcgagggtcggcccacgctgcgcctgctgccagccggcgttgccgccatgctggccataagagcgctgctgcgaaccgccgccaaactgggcgccgccctgcatcatccgcaggaattgatcgaactgggcgcgggagatgccgagctcgtcggcaatgacgaacagcacttcacgttcgttaggatgcagttcgccatcagcgaacgccgcctgcagctgaatttccagaaacatccgaatcagatcgaaacggccaaagcagacgctgcgcagctgacgcattttctcgcgcaggggatagttgtcggccttaccgtcgcgaaacgcctgctgcgccgcggtgcgcgaggcgccatgcaggttcatgcgatccattagcacattggcgacatgaatatccgcttcggtaacgcggcccttggatttggtcaggtgccccatcacttcgaaggtggtggaaaagaagagcgactgacgctcctgctgattggcgaagagatttaaccggcggctgcgcgcccggtcaaacatatggccgaccagaaagccaagcaccacgccccagaacccaccacccatcagcaaagccactgccacgccaatcactttacccaaatactgcatagactccccaactgtttatcgccgttaagctcgaatatgaccgcacgttacccggcactcgcgcctcggtcaattgtgggacatagcctataatttgctttatcatactcgtcattcaacagggtgcctaacgctcgggctcgaaacgggcaggattaacactagcgtgataatgttgagtaagttaggctctgaccgtttgcaagccgctgtcacaagatgatggaacaataaatacaacgtatgaaaaaacgtattcccagcctcctggctacgatgattgccagcgccttgtatagccaacaaggcctcgctgccgatctcgcaacgcaatgtatgcttggcgtgccaagctatgatcgtccgctcgtggaaggtcgtcctggcgatctgccggtgacgattaacgccgatcatgcgaagggcaactacccggacaacgccgtctttaccggcaacgtcgatattaaccaggggaatagtcgcctccgcgccgacgaagttcagctgcaccagcagcaggccgcgggccaggcgcagccggtgcgcacggtggacgcgctgggcaacgtgcattacgacgataaccaggtgatcctcaaagggccaaaagcctggtcgaatctgaataccaaagataccaacgtctggcagggcgattatcaaatggtcggacgccagggacgcggcaccgccgacctgatgaaacagcgcggtgaaaaccgctataccattctcgaaaacggcagctttacctcctgtctgccgggctccgacacctggagcgtcgtcggcagcgaagttatccacgatcgcgaagagcaggttgccgagatctggaacgcccgcttcaagcttggctctgtgccgattttctatagcccctacctgcagctgccggtgggcgataagcgtcgttcaggcttcctgatcccgaacgcgaaatacagcaccaaaaacggcgtggaattctccctgccgtactactggaacatcgcgccaaacttcgatgccactattactccgcactatatgaacaaacgcggcggcgtgatgtgggaaaacgagttccgctatctgacccagctcggcagcggcttaactgaattcgactacctgccgtcggataaagtctacgaagacgaccactcgagcgacagcaacagccgccgctggctgttctactggaaccactcaggggttatcgatcaggtatggcgtctgaacgctgactacaccaaggtcagcgatcctgactacttcaacgacttcagctcgaaatatggttccagtaccgacggctatgcgacgcagaaattcagcgccggttacgtcaaccagaactttgacgccacggtatcgaccaaacagttccaggtctttgaccgcgaatcgagcaactcctattcggctgagccgcagctcgacgtcaactactaccagaatgatgtcggtccgttcgatacccatctctatggacaggttgcccattttgttaactcgaataacaacatgccggaagcgacccgcgttcacttcgaaccgacgatcaacctgccgctgtccaacggttggggcagtctgaataccgaagccaagctgctggcgactcactaccagcagagcaacctcgataagtacaatgccgccaacggcactgactataaagagtccgtcagccgcgtaatgccgcagtttaaagtcgacggcaaaatggtctttgaacgcgacctgcaggagggattcacccaaacgctggaaccgcgcgtgcagtatctgtacgtgccgtaccgcgatcagagtgaaatcggcaactacgactccacgctgttgcagtcggattacaccggtctgttccgcgaccgtacctatagcggtctggaccgcatcgcgtcggctaatcaggtcaccaccgggctcacctcgcgcgtgtatgatgccgccgcggtggaacgttttaatatttccgttggtcaaatctactatttcaccgagtcacgcaccggtgatgacaacatcaactgggagaacaacgataccacgggttcactggtctgggccggcgatacctactggcgcattgccgatgaatggggtctgcgcggggggatccagtacgatacgcgtctggataacgttgccactggtaacggcaccattgaataccgtcgcgatgagaaccgcttagtccagcttaactatcgttacgccagcccggaatatattcaggccacgctgccgtcatattccaccgcggcacaatataaacagggtatttcgcaggtggggatgaccgccagttggccgattgtcgatcgctggtccgtggtcggggcctactactacgatactaatacccggaaagcagcaaaccagatgttgggtgtgcagtataactcctgctgctacgccatccgtcttggctacgaacgtaaagtcaacggctggaacagcaacgacaacggcggcgagagcaaatacgataacaccttcggaatcaatatcgaattgcgcggtctgagctctaactacggcctcggcacccagcagatgctgcgctcgaacattttaccgtaccagagctccctgtgatgcggctggtttacaacatcatccgcatttgcggttaatcgaaatggaaaaagtatgaagaactggaaaacgctgcttctcggtatcgccatgatcgcgaataccagtttcgctgccccccaggtggtcgataaagtagcggccgtcgtcaataatggcgtcgtgctggaaagcgacgtcgatggtttgatgcaatcggttaagctcaatgctggtcaggctggccaacagctgccggatgacgccaccctgcgccatcaaatcctcgaaagactgatcatggaccagatcgtgttacagatggggcagaagatgggcgtgaagatctctgacgaccagctcgatcaggctatcgccaacatcgccaaacaaaataatatgaccttggatcagatgcgcagccgtctggcgtatgaaggcatcaactacaacacctaccgtaaccagatccgtaaagagatgctgatttcggaagtgcgtaacaatgaagtgcgtcgtcgcatcaccgtgctgccgcaggaagtggaagcgctggcgaaacagatcggcgaccagaacgacgccagcaccgagctcaacctgagccacatcctgatcccgctgccggagaacccgacctctgacgaagtcgccgcggcccaggagcaagcaaactccatcgttgagcaggcgcgcaacggcgccaacttcggcaaactggcgatcacctactccgctgaccaacaggcgctgaagggtggccagatgggctggggccgtatccaggaactgccgggcattttcgctcaggcgttaagcaccgcgaagaaaggggatatcgtcggtccgattcgttccggcgttggtttccacattctgaaagtcaacgacctgcgcggtggtacccagaatatctccgttaccgaggttcacgcccgtcatattctgctgaaaccgtcgccgatcatgaacgacgcccaggctcaggctaagctggaacagatcgcagccgagattaagagcgggaaaatcacgtttgctcaagcggcgaaaacctattcggaagatccgggttcggcaaaccagggcggtgatttaggctgggccacgccggacatctttgacccggcgttccgcgatgcgctgatgcgtctgaacaaagggcagaccagcggaccggtgcactcttcctttggctggcatctgatcgaactgctggatagccgtcaggtcgacagaaccgacgccgcacagaaagatcgtgcttaccgcatgctgatgaaccgcaaattctctgaagaagcggcaacctggatgcaggaacagcgcgccagtgcgtatgttaaaattctgagcaactaatatcgatgcctgaaacccgtaaagttgttatcactcccggcgaacccgccgggattggccctgacctggtcgtgcagcttgcccagcgcgactggccagttgagctggtgatttgcgccgatggcgccctgttaactgaccgagccaagcggctcggtcttcctttatctctcctcccttacgatcccgcgcaacctcctgttcctcagcgcgccggtaccctgacgctgctgaacgtgccgctaaacgtcccggcggagcccggcgtgctgaatgtgcaaaacggcgcctacgtagtggagacgctggcgcgcgcctgcgacggttgccttagcggcgagtttgcggcgttagtgaccggcccggtgcataaaggcaacatcaacgacgccggtatcgcctttaccggtcataccgagttctttgaagagcgcgcgaaggccagcaaagtggtgatgatgttggcgaccgaggagctgcgggtggcgctggtcaccacccatctgccgttgaaagccatcagcgaagcgattacccccgagctactgcgcgagatcatcaccattctcgatcacgacctgcgcacgaaatttggcattgcccagccgcatgtgctggtttgcgggcttaacccgcacgctggcgaaggcggccatatgggaacagaagagatagacaccatcattccggtgctggaagagatgcgcgcaaaggggatgaacctcagcggtccgctgccggcagacaccctctttcagccaaaatatcttgatcatgccgatgcggtactcgcgatgtaccacgatcagggcctgcccgtgctaaaataccagggctttggccgcggcgtgaacattacgctcggtttaccttttattcgtacctccgtcgaccacggcaccgcactggaattagcgggccagggaaaagcggacgtcggcagttttatcacggcgcttaatctcgccatcaaaatgattgttaatacccaatgaataatcgagtccatcagggccatttagcccgtaaacgcttcgggcagaacttcctcaacgatcagtttgtgatcgacagcatcgtctcggcgattaacccgcagaaaggccaggcgatggttgaaatcggccccggcctggcggccctgaccgagccggtcggcgaacgccttgaccagctgaccgtcatcgaactggaccgcgatctggcggctcgcctgcagacgcatccgttcctcggtgcaaagctgaccatctatcagcaggatgcgatgaccatgaactttggcgaactggcggagaaaatgggccagccgctgcgcgtcttcggcaacctgccgtacaatatctcgaccccgctgatgttccatctgttcagctatactgatgccattgccgatatgcactttatgctgcagaaggaagtagtgaatcgtctggttgccggaccgaacagtaaggcgtatggtcggttaagcgtgatggcgcaatattattgccaggtgatcccggtactcgaagtgccgccgagcgcgtttaccccgccgcctaaggtcgactccgcggtggtacgcctggtgccgcacagcaccatgccgtatccggtcaaagagatccgggtgctgagccgcatcaccaccgaagcgttcaaccagcgccgcaagactatccgcaacagtctcggcaatctgttcagcgtggaagtgctgaccgagctgggcatcgacccggccatgcgcgccgaaaatatttccgtggcgcagtactgcctgatggccaactggctgtctgacaatctgccaacgaaggagagctaaccatgattcattcgccccgggtgtgtgtccaggtacagagcgtctatatcgaatcgcagtcttccccggaagaagagcgctacgtcttcgcttacaccgtcaccattcgcaacctggggcggagtcaggttcagctgcttggccgctactggctcatcactaacggccacggtcgtgagactgaagttcagggtgaaggggtggtcggcgagcaaccgcatattcccgccggcggtgaatatcaatataccagcggcgcagtgattgaaacgccgctgggaaccatgcagggtcattatgagatgatcgatatcgacggcgcgccgttccgtattgagatccctgttttccgtctcgcagttccaacgctcattcattaaaacaatgtcaacataccttattggcgacgttcacggttgctacgatgaactgatcgcattattagcgcaggttgaattcgatccgcggagagatacgctgtggctgaccggcgatctggtggcccgaggcccgggatcgctggaggtcctgcgctatgtcaaatctctgggcgacagcgtacgactggtgctgggcaaccatgacttacacctgctggcggtctttgccggtatcagccgcaacaagccgaaggatcgtctgaaaccactgctggaagcgccggatgccgatgagctgctcaactggctgcgtcgccagccgctgctgcaggtggatgaagagaaaaagctggtgatggcccatgccggcattacgccgcagtgggatctggagaccgcccagcagtgcgcgcgcgatgttgaagcagtgctctccagcgactcctatcctttcttcctcgatgccatgtacggcgacatgccgaaccactggagcaacgagctgagcggcctggcgcgcctgcgctttatctctaacgcctttacccgcatgcgctactgtttcccgaacggccagctggatatgtattcgaaggaagcgcccgaggacgccccggcgccgctgaagccgtggtttgccattcccggcccggtcagcaatgcctacagcattgcctttggccactgggcttcgctggagggacgcggcacgccggaggggatttacgccctggataccggctgctgctggggcggggaactcacctgcctgcgctgggaagataagcagtacttcaccgagccgtcaaaccggcagaaaagcctcgacgaaggcgaagccgtcgcgtcctgactcttcccggatagcggcgcgttgcgccttatccgggctacctgcggcgtcgttttgtcgggtggcggctaacgccttacccgacctacatttccttgccatttgtagcccgggcagcactccaggaagacgaagcccgcgacgggaaacatgacgcagtcccgtaggcccgcgcaagcgcagcgccgccgggcaagaactgcgggcgcggagccacttttgtgtcgggggacggctaacgccttactcgacctacgtttaagtgctatttgtcgccccggggagcgcttcagaaagaagacgaagcccgcgatgggaaacacgacgcagtcccgtaggcccgcgcaagcgcagcgccgccgggcaagaactgcgggcgcggagccaattttgtgtcgggtgacggctaacgccttacccgacctacgtttaagtgctatttgtcgccccggggagcgcttcagaaagaagacgaagcccgcgacgggaaacatgacgagatactgagtgcgccatcgtcgcgcaattcatgcaaaagaaaaccccggtcacgccagacgcgaccggggtttttttatcgctatcctgcccgcttaacggcgttcgaggatctcaaagcagtagctatgggagttctgcgcgtcggcgtcatgaaactcgctgaacaccgactcccattcgtccggatcgtaatccgggaaatgggtatcgccttccacttccgcatcaatatgggtcaagtagagcttctgcgctttcggcaggaactgctcatacacccggccgccgccgatcaccataatctcttccacatcgccgcaggcggcaattgcttcttctacggaggagacccactgcacgcgatcgtcgctgccgggtttgctgctgatcacgatatttttacgccccggcaatgggcgcccaatggattcccaggtcagacgccccatcaccaccggcttatttaacgtgttgcgtttgaaccaggcgagatcggcaggcaggttccatggcatggcgttttccataccaatgacgcgatctaccgctaacgccgcaatcagactgatcattcattcattcccgagtgcaaaaaattgtcgccactatacggaaagcgtacaacttcgtcgactggccggagggtaaagaataagaaaattttctgatttgctggcaagcccacgttcacaccgtgggccgccagaagaggatccaaacgaaaacaaaatgttactggtcagcctcaggctgagggcttattttccggctcatcggcgatatccccggtgtgcctgccctcttccgtcccctgccagccatgacgctgcaccagcgacagatgatgacgatcttcgttgatgatgccggtcagcatatcgctggtccgcttgaagaccgccacccgcgacgcggcatcgttttccgccatcgccaccatctcttcgaccatctgcaggttgaatcgacggaacagatcggcccgctcgcgcgcttcataggcgccgagccccagcgcctccagcgtcattcggccggacttcagcgccgcctcgaaggtttcacgctccggggcctcgacgccagcctggcgcagctgaatgtaatgatcgacatcgcgggcgcgggagatgatctgcagatgcggaaaatgctcttttaccctcgccaccagctccaggctgacgtgcggatcgtcaatggcattgatcagcacttccgccttttcggccccggccgactccagcagatcgacccgggtggcatcgccgtagaaaaccttcatatcaaatttgcgcagggtatcgacatggtccgggtcatgatcgaggatcaccatcttcaccccgctcgagagcagcaatcgcccggcaatctgcccgaagcggccaaagccggcgacaatcacccgcggctgctcttcatcaatctcgtcagcatcacgcgcctggccgctggacgatttctccagacgggtcagcagcaccagcagaatgggggttgccgccatcgacagggccaccgccagggtcaacgcttttgcccattcgccgtccagtacatccgccatccgcgcggcgccaaacaccacaaacgcgaactcactcccctgccccagcagcaccgcaaaccagcggcgctgggcgcgcggtacgccaagcggcctggcgataagccacagcatcagcatttttatcgccaggaaaccgaccagcaaaatcacaatacgcagcggatgggtgaccagggtgccaaaatcaatcgacatgccgacgccgataaagaacagccccaacagcagtcctttaaacggctcaatatcactctccagcgcatgacgatattcggaactggccagcagcaccccggcgagaaacgcccccatcgccatcgacagccccacctcttccagcaataagccaaagccgaagaccaggaacagggccacggcgctgaacacttcgcgcaggccggaacgggcgacaaagcgcagcagcgggcgggtcagatagcgcccaaggaccaccaccagcgccagcgctgcggccactttcagcgcggagagggcaaaagccatcagcgaagtggcgccgccgctggccgccagcagcgggatcatcgccaccagcgggatcgcggcgatatcctggaacagcagcaccgcaaaggcgctgcgccccatctgcgacaccgtcagattgcgctcattcatcgcctgcatagcaatggctgtggaagaaagcgccagagtcataccaatcagctcggccacctgccagcgcaggcccagcagcatgcagaacaggccgatcaacaccccgcaggccaccatctgcagtgcgccgccgccaaacaccgaggcgcgcagcttccataagcgctgcggatcgagctccagaccaatgacgaacaacatcagcaccacgccaatctcggcaaagtgcagaatcgcctcggcatcggtcaccagccgcagcgcccacgggccgataatacagccggcgatgagatagcccagcactgaccccagccccagacggacggcgatgggcacaatcagcgccgcggcgccgaggtaaatcaacgcctgtatcagcgtatggctatccattctggtgtgcctcctgccagtcgattaagcgttgacgatagcggcgggcctgcgcctgcagcgtttcatcatcgcagataaaggtgcagtgcatagcgaacggcggcagccatttcatcccgcagtaaagcgcagttgcctgcagaggctgcgccagcaccgggaaaccgggaaacgaaccgatatcaaagtggctttcaccgccgccggtagtgaccgcccacatcagcgatttaccgcgcagggcaataccgttgtgaccataggcccagccgtgcgacagcaccttgtccatccacagcttgagcagcggcggtacgctataccactgcataggatgctgccagataaccagatcggcacgggccagcgccgcctgctcggcggcgacatcgatattaaagtcgggatagagttgatagagggagcgtatctctacgccttcaagcgtccctgcctgttcaagcattcgcttattcgcatgagaatgctgcggataaggatgcgcataaattatcagaatcattgattggcctgcgtttgctcttgtcgtaatcagcaagagtgtagacagttaagcgaaccgcttacaatgataactgtgatttatgtcgcgatggcttacgcaacgcgcgccctgagggttaacgtcaggccttagttatccagctcgtccatggacttcacctggtcgcggttaatctgctccacgcggccggtttcggcatttttgtatgagacgaggccggtgtcatcatccacctgcggtttaccgctggtgacaatggtcttgccgtcggtggttttgatcgactgattcgatgagcagccggccacgaacatgattgccgtcgctgccagtgcggatgccaccagaatattgttccgcattgtatcctcctgtcttttcatcaataggtatcgttatggtgctaactatagttagcctgacccgacagggggttaaaagcagaactctctgaagatggctgcggccaaaaaaaataggctgacgatgtcgtcagcccaggattgttgctatccggccaggccgggaagcttatttagtgatttgcgcgtgcatttcctgaaccgaaatcaccttctcggtggcgtcagcgttcagcgccatcgcggtggcaaagccgccgttcagggtggtgtcgtaatgcactttgtactgcagcgcgctgcggcgaatcagcttggagtcttcaatcgcctggcgacctgcggtggtgttgatgatgtaggtatattcgccattcttgatgcggtcctgaatgtgcggacgaccttcatgcaccttgttcaccagacgcgggttaatgcccgcttcacccagcacaatcgccgtaccgtgagtcgcatccagctcgaagccaaacttcagcagcttcgccgccaggtcaaccacgcgctctttatcgccttcgcggacggagagcagcgcgcgaccctgtttcttcatggtcgagttgctgcccagctgcgctttggcgaacgcttcggcaaaggtgcggccgacgcccatcacttccccggtggagcgcatttctggccctaacagcgggtcaacgcccgggaatttattgaacggcaggaccacctctttcaccgagtagtacggcgggatgatctctttggtcacgccctgctgcgccagcgtcttaccggccatcacgcgcgccgccactttcgccagcgggacgccggtggctttggagacgaacggtacggtacgcgccgcacgcgggttgacctcaatcagataaacttcgttatctttcaccgcgaactggacgttcatcaggccgcgaacctgcagctcgaaggccagcttctgcacctgctcgcgcatcacatcctgaatctctttgctcagggtgtaggccggcagggaacaggcggagtcgccggagtggacgcctgcctgctcgatatgctccatgatgccgccaatcagcaccatttcgccatcgcagatggcatcgacatccacttcaatcgcatcgtcgaggaagcgatccagcagcaccggcgcgtcgttggagacgctgaccgcggtctggaagtagcggcgcagatcctgctcgtcatagacgatctccatcgcccggccgccgagcacataagacggacgcactaccagcgggtagccaatctctttcgctttctctaccgcctgctcaatggcggtgacggtggcgttcgccggctgcttcagcttcagacggtcaaccgcgtgctggaagcgctcacggtcttccgcccggtcgatagcgtccggactggtaccgataaccggcacgccggcagcttccagggcacgagccagcttcagcggggtctggccgccgtactggacgataacgccttttggcttctcgatgcgcacgatttccagcacgtcttccagggtcaccggctcaaaatacagacggtcggaggtgtcgtagtcggtagagacggtttccgggttacagttgaccatgatggtctcgtaaccgtcctcgcgcagcgccagcgaggcgtgtacgcagcagtagtcgaattcgataccctgcccgatacggttcgggccgccgccgaggaccatgattttatcgcggtcaacggacgggttggactcacactcttcttcataagtggagtacatgtaggcggtatcggtagcaaattccgcagcgcaggtgtccacgcgcttgtagaccgggtgcaggtcatactggtcgcgcagcttgcggatttccgcttcccgcacgcccgccagcttcgccagacgcgcatcggcaaagcctttacgcttcagggtgcgcaggaagtcagcgtcgaggccgttgatgcccacttccgccactttctcttccagacggaccagctcttcaatctgtaccaggaaccagcggtcgatgttggtcaggttgaagacgccgtcaaccgagaggcccgcgcggaacgcgtcagcgatataccagatacgctcagcgccggcatctttcagctcgcggcggattttggtcagcgcttccgggtcgtcgaggctcactttcgggtcaaagccggtagcgcccacttccagaccgcgcagcgctttctgcaaagattcctgctgggtacggccaatcgccatcacttcgccgacagacttcatctgggtggtcagacggtcgttggcgccggcgaatttttcgaagttaaagcgtgggattttagtgaccacgtagtcgatggacggttcaaaggaagccggggtgcggccgccggtgatgtcgttcatcagctcgtcaagggtataacctaccgccagcttggctgccactttagcaatcgggaagccggtggccttagaggccagcgccgaggagcgggagacgcgcgggttcatttcgataacgatcaggcgaccgtttttcgggttgaccgcgaactgcacgttagagccgccggtttcgacgccgatttcacgcagcaccgccatcgaggcgttacgcatgatctggtactctttgtcggtcagggtctgcgccggggcaacggtgatggagtcaccggtgtggatccccatggcgtcgaagttttcgatggagcagacgatgatgcagttatcgttcttatcgcgcaccacttccatctcgtactctttccagccgatcagcgattcatcgatcagcagttcgttggtcggagagagatccaggccgcgttcgcaaatttcttcgaactcttcgcggttataggcgataccgccgccggtgccgcccatggtgaaggacggacggatgatgcacgggaaaccaacgtcggcggcaaccgccagcgcctcttccatcgtgtgggcgataccagagcgcgcggtgtcgaggccgatttttttcattgcgatatcgaaacggcgacggtcttcggctttatcaatcgcatcggcggtggcaccaatcatggtcacgccgaattcagccagtaccccctgacgctccagctcgagcgcgcagttcagcgccgtctggccgcccatggtcggcagcaccgcatccgggcgctctttttcgatgattttacgcaccacttcccagtgaatcggctcgatgtaggtggcatcggccatttccgggtcggtcatgatggtcgccgggttagagttcaccaggataacgcggtagccctcttcgcgcagcgctttacacgcctgggcgccggagtagtcaaactcacacgcctgaccgataacaatcgggcccgcgcccagaatcaggatactttttatgtctgtacgttttggcattgctcttttactcctgattatttcgcggactgacggtattgctcaattaactcgataaagtggtcgaacagcggcgcggcatcgtgcggccccgggctcgcttcagggtgcccctggaagctgaacgccggtttgtcggtacgatggatcccctgcagggtgccgtcgaacagcgacttatgggtcacgcgcaggttggccggcagcgtcgcctcatctacggcgaaaccgtggttctgggcagtgatcatcaccacgttgttatcaatatctttcaccgggtggttgccgccgtggtggccgaacttcatcttaatggtcttggcaccgctcgccagcgccagtagctgatggccaaggcagatgccgaataccggaatatcggtctcaaggaatttttcaatcgcctcgatagcgtaatcgcacggcgccgggtcgccagggccgttggagaggaagataccgtccggattgagcgccagcacgtccgcggcggaggtcttcgccggcaccaccgtcaggcggcagccgcggtcaaccagcatgcgcaggatgttgcgtttcgcgccgaagtcatatgccacaacgtggaacggcagctcgctttccgctttcgcttccggcaggtcgcccgccagggtccagctgccttgcgtccagctataggtttctgcggtggtcacttccttcgccaagtccatgccgttcaggcccgggaacgctttcgctttttccagcgccagctgggcatccgggctgtcgcccgcgatgatgcagccgttttgcgcccctttctcacgcagcagacgcgtcagcttgcgggtatcgatatcggcaatcgccacgatgttatggcgcttcagataagaagagaggtcttcagtactgcggaagttgctggcaatcagcggcaggtcgcgaataaccagaccctgcgcatgtacctgagaagattcttcatcggcggcgttggtgccgacattaccaatatgaggataagtaagagtgacgatttggcgggaataggaaggatcagtgaggatttcttgataaccggtcattgaagtattgaaaacgacttccccaaccgccgtgccggttgccccgatggcccgaccgtgaaactgggttccgtcttccagaaccaatagcgctgacttaatcaaaacatcctccagagaatatccactcactttatttgcatattaattcataaacacgatctgaatcaatgcaaatctgttgcccgcagatttttggcaaacggcggcattctggagagatgtcggataaaagtcaacttaaagcggagatttttaatgtcattttacgccactgatgcgtaacacgtgatttttacgccaaaaagatcaacaaacctggctgagaaaacgcttgcggatgtggaagagtgtaaaacagagcgatgctcggcaaaaaagtggaccagatggtcaaaatttacatttcattcactaaaaaacacgctaatactgtattttttacgcgttacactcaaaacatcaaccgtaatacgcaaaaataaaaaagggcaacaaaatattgccctctgcatcaataacttattgatagcaataaccacatcacgatgggtaataatcgttataaagcattcaaatcaagcacatcacgcatatcaaacaggccatttttcttgcctttcagccataatgctgaacgaacggcgccatttgcaaaggtcatgcggctggacgctttatgggtgatttcaatacgctcaccgatgtcagcaaacattgccgtatgctccccgacgatatcgcccgcgcgaacggtcgcgaagccgatggtgcccgggacgcgttcgccagtgtagccttcacgactgtagaccgcgcagtccttaagatctttgttcaatgccccggcgatcgcttcgcccatcgccagcgcggtgcctgacggcgcatccactttatgccggtggtgcgcttcgataatttcgatgtcggtatagtcgcccatcaccttcgccgccttctccagcagcttcaacaggacattgacgccaacgctaaagttagcggcgaagacaatggcaatgtcctgcgcggcatcgcgaatcgcctgtttgccagcgtcgtcaaaaccggtggtgccgatgaccatccctttgccgtgctcgcggcaaaacgccagatggttcagcgtgccttccgggcgggtaaaatcgatcaacacgtcgaaatcatcttttaccgccgccaggctgctctgcaccgcgacgcccgctttgccggcgcccgccagctcgccggcgtcgctgcccaccaggcttgacccttcgcgctccagcgccgcgcccagcgccacgccttccatctgcaatgcagcctgaattaactggcgtcccatccggccgcccgcgccggcgatggccacgcggatttgtgcatcatgcatagctattctcttttgttaacattacgtaaattgttttcagagtaaccagcccgtcagcgggccgctactcaaaaacgccgataattagaaatttatgacaaacggcggacgatatcagtaaaaactatacgattgtgctgaaatgcgggctttgcgggtgctctctctgagacgataatcgacgttttcgtcatcagttggtttcaagaaataagatgcactaaatctggcaaactcgaccgaccagcattgaaatgctagggaaacattatacttccggtagagcagaaagccttacgccagggtgtagctgaccaccagctgccccttcttcatcttaatctgactaatgacaatgtcgcccagctccgccagacgggcgacgtgggtgcctccgcagggataggctggcagctcgccgaatcccaccttgcgcatgccatcagcgaacgtcacctgacgcggtaagtcctgcgcctgccatgcctttactagcgccagtagcgcactggcgtccggcagcgcggcgctattcctgctggcaaaggttatccgcccttcgccgggccagtggtgcgctttcaccggttgccagccaagctgttcgcccgccaggccaagcaggtggccggcagaatgcagacgagcatgcagctgtctcgcggaggcatcaattttcatctccacttcaccgaggggaaggggttgcgacagaatatgcagcaccctttcgccgcgcacagccaccgtctcaaccacctgcccggcaatccatccacggtccgccggttgaccgcccccttgcgggtgaaacagcgtccgctccagttcgatggcgtaacggccatccgcttctgcagtgcaggcgatgatctgggcgcgcccgtcggtagcatcgctggtgtaataaacccgttcagtcatagtgattctcctctctgtccggccagtatattattaatgccgacagcgataatcccaccaccagccaatgcactcttgctccgggagcacaaatgaatctgaacctcctgcccgacctcgctcttttcgttcagatagtcgaccagggcagcttctctgccgtcgcccgccagaacggcattaccccttcagccgttagccgcagcgtgtcacggctggagcgagagatgggctgcaaactgctgcagcgtaccacccgcaagctgcgtcttagcgatgccggggaaacgatatatcagcatgcccagcagatgctggaagcggcgcgacaggcaatggattccgcaggcagtcgccaaacggtcgcccagggaaagctgacgctaagcgtcccgaaagccgtcggccgctttgtgatccacccgctgatgatggcgtttttccaccgctacccgcaggtggacgtctgcctgcggctggaagatcgccctctcgattttatcgatgacggtattgatctggcgctacgcatcaccgataccccctcccccggcctgcatggcaaaccgctgatgccaatcaggcacgttatctgcgccactgaggcctatttacagcagcacggtacgccgtacacgccgcaggatctgcgcgcgcatagctgcattagccttggcgaaacgcccgccgatgcgcgctggaagttccgtcgggaaggcaaaacagaaacggtgcaaacctacgggcggtacgccgccaaccataccgccgtacgcctcgacgcggtcagacagcatttagggatcggcagcctgccgctgttcaccgcccgtgaggcgctggcgaacggcgacatcgtgcaggtgctgcccgagtgggaatttatcagcagctactccggcgacctgtggctactgtgggcgggagataagcatatgcccgccaggatgcgggcgatgatcgattatctcagcgagacggtgccggcgctgaacgcaggcagcacagagccagcgaaataattgcaaaccacggaatgataactcccaacacaaaccagatcccggagcggccgatatcatgcattcgccggcagccaacagccagcagggggatcgccatcatcagcagccacagcgccgcaaagtatatgacaacaaaactgaggagcccgtagtgagggtcaacaagggtggccagactccaggcggccactggcgcggcggcgatcaatacattgatgagaaaaaacgtcaagaactgctgccggctggcgcggccactaaaattaaaggtctctttccagccgctcaaatacgcctgtccataggtcattgcttctctccttgaaaatcgagtgatatatcacggcgccagggcaatcacctccgccgcccagcgctgaaacccttcgacgtcgatatccagcgccacctgggcgttcgccggctggcccagtcgtccttcgatatccaccaccgtggtgccggcggtccaggtcccctgcgtctccaccgccacaaagcacggctggagagtgaacagttccgggcgggccagccacgcaatagcgcacaagtcgtgcatgcgcagaccgctgctcatgctgccgctgcgatagtggctaaacagcgcatggagcattttaccggtctggttcagcgtcggcagcgtcgccagataatccgccgccagcagcgcccggttggtgacgtccagcccgcacatcacaatctccagcccgctgtggaacactttcgcggcggcctccgggtcgatagcgatattgaattccgcattcggcgtgaagttgccgcggcccgccgagccgcccatgatcaccagccggcgaatattaaacacacattccgggtactgggtcagcagtagcgctatattggtcagcggaccaatcgccaccagggtgatcggctcggcagcatgcataagtgcatcacggatcgcctggaaggccggcttcgccagcggttgacgttgatgctcaacaaagtcatacccctccatgccggattcgccatgcaccgaggcggcgtcgcgcaacggacgcaccagcggcatcgacgcgccctgcgccagcggtacatcggcattccagaaatgcagcaattgcagcgcgttacgggtcgtcttctccaccgagacattgcccgctacggtggtcatcaactgcagatccagctcaggcgcgaacagcgccgcggcaatggcggcggcatcgtcgatgcccggatcggtatcaagaatgattggtaagcgcatggtttctccctaaaaaaatgccagacgttaagtctggcatcttctcatactgctggaggaaagaacttactctacttcacggacatccacacgcagctctttcggcacttcaaagacgatattctcttcccggccttccagcggcacggcttcgccgccgcccagctcctgcaggcgggtaatgacgttctgcaccagaatatccggcgccgacgcgcccgccgtcacgccgacgcaggccgcatccttgacccacgcttcctggatatcggaggcgtcgtcaatcagataagccgctttgcccatccgctgcgccagttcggcgaggcggttagagttggaggagtttttcgacccgaccaccagcactacgtcagcctgctccgccagcgcgcgcacggcttcctgacggttagtggtggcatagcaaatgtcgtctttgcgcgggccgacgattttcggaaaacgcgcgcgcagggcgtcaatcacatccgaggtatcgtcgacggagagcgtggtctgggtcataaacgacagccgggcgtcatttttcacttccagcttcagcacgtcttccggcgactcgaccaggtacatccccccttgcgggttgttgtactgtcccatggtgccttcgacttccgggtggccggcatggccaatcagaatcgactcttcgccgcggcggctggcgcgggcgacttccatatggactttggtcaccagcggacaggtagcatcgaacaccgtcaggtcgcggctcttcgcttcgttgcgtaccgcctgcgacacgccgtgggcggagaaaatcaggatcgcgccgtccggcacttcgctgatctgttcgataaaaatggcgccacgcttgcgcaggctatccaccacatagcggttgtgcaccacttcatgacgaacatagatcggtgcgccatacagcgtcagcgcgttttctacaatgctgatagcgcggtcaacgccagcgcaaaaaccgcgcgggttagccaacaggatctgcatgttactcctccagcgccggatcgatctccagcacttcaatatcaaaatgaacagtgcgcccggccagcggatggttgaagtcaacggtgatggaatcgccgttcacttcgcggatcacgccaggcatttcgctgccatccattgcggtaaagagcataatcgcgccgatctccggctcgccagcgtcgataaactcgcggcgagagaaatactgaatcaggtccgggctgggtacgccaaaggcggcgtcaggctccagcgaaaaggcctttttctccccctctttcaaaccgagaagctgttgctccagcccttcagacaaagaggtgtcgccgaggcgaaacagcgccggtttgccgttgctgcgggtggactcggcagtggagccgtcgtccagtttcagagtgaagtgcaccagtaccgcgctgttgctctgtacggatttagacatgcaaattgctcgcttgtttaggtcacctggtgcccggcggcattacgcttaccgggcctacgggagccaaaaattctgtaggccgggtaagcgtcacgtcacccggcattgagatttacgcctgctctttcacagtcggtttcggcaggaagccttccagcacaatcagcgctgcgccgatgcagatcgcgctatcggcgaggttgaaggtggcaaaatgccagtcgccgacgtagaagtcgatcatatcgaccacaaagccatgccacaggcgatcgaacaagttgcccagcgcgccgccgataatcagcgcgtaggcaatattgttcagcttttgcgtcgccttcgaacggtacatcagcatcgtcagcaccacgcaaatgccgatcgcgatcccggaaaagaaccagcgctgccagccgccgctgtcggcgaggaagctaaaggccgcgccatagttgcgggcataatgcagattaagcgacgggaacagcggaaccgtctcccccagagcgaagtactggaggatcaggaatttgctgcccagatcgataatcagcacggctacgaccacccacagccagcgtagccccgttgaacagatcgatttactcatcaggcgaatttacgttgctcgccgtcaccggcgacgttgctcacacagcgtccgcagatttccgcgtgttccgccaccttgccgatatcggtggtgtaatgccagcagcgcgggcatttctcaccttcagctttactcaatgcgactttcaaccctttgagcagttcgctttgctgcgcatcagcggacgcgctcgcatagtctgcgacgttcgccccggaggtcaacaggacaaatcgcaattcatcgcccagcgcattgagcttagccgccagatcggcatcagcatacagcgtgactgccgcttccagcgagccgccgactttcttatccgcacgcgcctgctcgatcaccttgttgacttcgccacgcaccttcagcagctcatcccagaaatcgtcgttcatcgcttcgtcgtcggccaggccgaacagaccttcataccactcgccggtgaagacatatttctcacgctcgcccggcagatagccccagatttcatctgcggtgaaggacatgatcggcgccatccagcgcaccagcgcttccacgatatggaacagcgcggtctggcagctgcgacgcgccacgctgtccgccttggcggtgtactggcggtctttgatgatgtcgaggtagaacgagcccatctcgatggagcagaagcgcatcaggcgctgcaccacttcatggaagtcgtaggattcgtaggctttcaggatatctttctgtgccgcctgcgcgcagccgaccgcccagcggtccagcaccaccatctcttccggtttaaccatgtctttcaccggatcgaaaccgttaaggttcgccagcaggaagcgcgcggtgttacggatacgacgatagctgtccgcagcgcgtttgaggatctcgtcagagaccgccatttcgccggtgtagtcggtggaagccacccacaggcgcaggatatcggcgccgagcttgttcatcacgtcctgcgggctaacggtgttgccgatagacttggacattttgcggccctgaccgtcgacggtgaagccgtgggtcagtacctgacgatatggcgctttgcctttcatcgccgtggaaatcatcagcgaggacatgaaccagccgcgatgctggtcagaaccttccagatacatatcggcggcgtgaccagcgaattccggacgcacgtcaaccacggaagagtgggtcgacccggagtcaaaccagacgtcgagggtatccggcactttctcgtagctgtcggcgtcatcgccaagaatgtcgcgggaatcgagatcccaccacgcctggatgccgtcaacttcaacgcgttttgccacttcttccatcagttcaagggtacgcgggtgcagttcgtgggtttctttatgcacgaacagcgacatcggcacgccccaggtgcgctgacgggagatacaccagtcagggcggttagcgaccatcgattcgatacgcgcctggccccagtccgggatccactgcacgcctttgatctctttcagcgactgcgcgcgcaggcctttctgatccatgctcacgaaccactgcggagtggcgcggaagatgatcggcgacttgtggcgccagcagcatggatagctgtgctgcagtttctcaacgtgtaacagcgcgccacgctcacgcagcatctcaacgatgatgtcattggctttgaaaacattaatgccgtccagggacggccaggtgccaggcaggtaagcgccgtccgggccaaccgggttggcgatttccagaccgtatttctggctgatggtgtagtcgtccggaccgtggccgccagcggtatgcaccgcaccggtaccggcatccagcgttacgtggtcgccaaggatcgccggcacgtcgaaatcgaggaacggatgcttaaagcgcatcagctcaagctcagaaccttgtaccgccgccagaatagtgtagtccgtcgcgccaacgcgcttcattacgctctcaaccaggtctttcgccaggatcagcgcctggccgtcaacctgcaccagcgcatagtcgaactcaggagacagagagatagcgcggttggccggcagggtccacggcgtggtggtccagataaccagcgacaccggaccgttgacgtcgactacgccgaatttcgccagtaccgcggctttgtctaccgcgtggaacgcgacatcgatagacggagaggttttgtcgtaatactccacttccgcttccgccagcgcggaacggcagtctacgcaccagtgcaccggtttggcgcctttatgcaggtggccattaccgatgattttgcccagcgcgcggatgatgttggcttcggttttgaagtccatggtcaggtacggatgcgaccagtcgcccagcacgccgagacggataaagtctttacgctggccatcgatctgctcggcggcatattcgcggcacttagcgcggaattcggcagcggtaaatttctcacccggcttgccgtattcctgctccactttcagctcgatcggcagaccgtggcagtcccagcccggaacgtaaggcgagtcatagcccgtcagtcctttggacttaacgataatatctttcagaatcttgtttaccgagtgaccaatatgaatgctgccattcgcataaggagggccatcatgcagaatgaaggtttttttgccttttttggctgcacgaatgatgccgtacaggtcatcatcggtccaacgcgccagcattcccggttcgcgtttggcgaggtcgccacgcatagggaaccctgtttccggcaaattcagggtcgatttatagtcactcatcagattctcggttccgtatttcggtttgataaacaccagtggctcaggcctggctggtcagcccaaataattcgcgggccgttaactcatcacgtgcgatttgcgccttcagctcgtccagcgacgcaaaccgctgctcgttacgtatctttttacgcagtattacattgatatggcgaccgtagaggtccattacaacgtccaacagatgtacttcgagctgctgacgcacgcccgcaaccgttggacgggtgccaatattggcgacgcccgctatcggtttgtcgcccagccctgtcacttctaccgcatagacccctttaaccggggaaacctgacgacgcagcggtaagttcgccgtcggaaaacctatggttcggcctagttcatcaccatgcacgacgcgtccggagatgctaaacggatggccgagcagcgtctccgccagcaggagatcgtcatcggccagcgcctggcgtaccgccgtgctgctgattcgcaccccgccttcgcagaaggtctgggtgctggtgacgtcgaagccatattccgcccccgctttttgtaataacaagaaatccccctggcgaccagcgccaaagcggaaatcgtcaccaacggcgaggaactgcacgcccaggcgacgcaccagcagttcactgataaaatcctgcgcggttagcgcggcgaaccggcggtcaaagcgaacgcacaatacatagtcaaccccgctttcagccagatagcccagcttttcacgcaggcgggtcaatcgcgccggggctttatcagcggcaaagagctccagcggctggggttcaaaaatcatcaccacgaccggtaaaccgcgctggcggccctcttcgcgcaaccgctgcagcagcgcctgatgcccacgatgcacgccgtcgaaattaccaatggtcagcacgcacccgtgcggggcctgactgagattatgtatgccgcgtatcagcttcatgtctggctcaaaacagtgaaaatcgtccgagtataccttgtacaactgtcaacgttaaccagcgattgcacctcggcaacgaaagttctcaggaattcattcactcagcgcgagaaagcgtgaaaactggccgcgcccggcgatttttatggtggaaaagctgtattcgcctgcaacaagctggtagaatcttgcgccatcactacgtaatgaagcgctgtggtgttaaacggcgcttatttgcacaaatccattgacaaaagaaggctaaacgggcatattcctcggcctttgaattgtccatatagaacacatttgggagttggaccttggctaatatcaaatcagctaagaagcgcgccgttcagtctgaaaaggctcgcaagcacaacgcaagccgtcgctctatgatgcgtactttcatcaagaaagtatacgcagctatcgaagctggcgacaaagctgctgcacagaaagcatttaacgaaatgcaaccgatcgtggaccgtcaggctgctaaaggtctgatccacaaaaacaaagctgcgcgtcataaagcaaacctgactgcacagatcaacaaactggcttaatcgcctgcttgctgaactttgttaaagaaacccgcgaaagcgggtttttttatgcctaccatcttcccccggtagcgcacgctggcgcgatctgagccacgccagcccacgccttccggctatcggggttcggtgaacagcgacgaataatcgcgattacagatacgctgtaccgccgggtgctgaatcattctttcagcgaaaatagcgtgatactcctccatcacgctatccatacggccaatttcgacaatcgattcatcatggtagaaatcatgcgcgtagagcgtcggcgcgacaaatatcgcattatgtgcggcgccgaaggctttcatgagcgccgcgtcgtcaaactcgccgaggatctccaccttcaggccctgcacgttaatccagttcaacagcttacgtcccagcatcgatcgccggccggggatcagcagccgccgctcttcgaggcaggccgggaacggcttcgtcggcgccggattcatgcaccagaagctgacgctgcactcgccgatcttcaccgaaaatagcccttcctgctgcgtcgagtcgatcgggcagtcagagataatcatgtcgagcttatgctggctcagctgctccagcagcagctcatgagtggattcaaaacagcgcagatgaatctgctcgctctcaacgacggcggcatccagcacgccgctgaccagccgtttcgagagcgcatcggccacgccgacgtcaaacagcaggttcgactctttgcgatagttgacgatgtcgagcatctcctggctgagggtaaacatccggtcggcatagcgaaaaaccagctcccccagctcgctcggctcaagccccctcccctttcgcttaaataatttcccctgcaggcgctcctccagggctttgatctgcccggtaatggtctgcggcgtcagaaacagcgcctccgccgcgcccacgacggacccttctttatacacgtgccagaagtagtacagatgattgtagttaatatgtgacatgcttctctccctgataatgtccaggagagcctgacgggctctcctgcagaaaggttataccgcgaggcgagtatccgtcacgcgctgacgcagtatgaggtagccgacgaccgctgatagcactgagccgatcagaatgccaagcttggcccagttgatcaacgcgggatccacgctgccaaaggccagggtggcgatgaaaatcgacatcgtaaagccaatcccgcacaggatccccaccgccataatttgcttgcaggtggttccctccggcagcgaagcccacttcagcttcagggccagccagcagaacaggctaatccccagcggcttaccgataaacaggccagccataatgcccagcggcaggagcgacgtcagcccggcaagggtgaccccctgcagtgagacccccgcgttcgcgaaggcaaacagcggcaggatcataaacgccacccacgggtgcaggacatgctcaagcgctttggccggcgacttgccatgcttttcttcgagcgggatcataaagccgacaatcaccccggcaagggtcgcgtgaacgccagacttcagcaccgccgtccacagcaccgcgccaaccagaatatagatcccggtacgccgcacgccgctcagattcagggccaccagcaccgcgatcgccgccgccgccacgcccagcgagagcatggacaggtcgtgggtataaaacagcgcgataatcacgatagccccgaggtcatcaataatcgccagcgccatcaggaaaatcttcagcgccgtcgggacccggctacctaacagcgccagcacgccgagggcaaaggcaatatccgtcgccgccgggatcgcccatccctctctggcgacaggatcctgggcgttaaaagccaggtagaccagcgccgggacgatcatcccgcccagcgcggctatcaccgggaagaccgcctgacggcggctcgccagcgacccctgaatcagctcacgcttgacctccaggccaatcagcaaaaagaacaccgccatcagggcatcattgatccataacagcatgttcttgttgatctccagcgtgcccacacgcagctgtactggcgtctcaaggaaggagtgatacagaccgctggtcacgctggtattggccatcaccatcgccagcgcggcggcgataattaagacaatgccgccggaagcatcgctactaaagaatcgttgcagatgtttcacttttactttcatcctgttggtgaataactcgataaaagcataatacacacactgataactcgaaaaaatcagatttaagttgcgctaatattcgctttttacgagttaaaggggagttctaaggcgaaaaaaagcccgggcagcaaaggcccgggccggatatcaacaaaggcggaattagcgggtcaggtcgtcgaagaacttcttcacgccgtcaaagaagcttttcgaacgcgggctgttgttttccccggtcggaccgccgaagctctcctgcaactctttcagcagctgcttctgcttctcattcagccccaccggcgtctccaccaccacgcggcacagcagatcgccctgcgcgccgccgcgaacggatttcacgccttttccacgcatgcggaacagcttgccggtctgggtttcacctggaattttcaggttcacgcggccgtcgagcgttgggacctcgatctcaccgcccagcgccgccatggtgaagttgatcggaacttcgcagtacaggttattgccttcacgctcaaagatagcgtgctgcttcacctgaacctgaacgtacagatcgcctgccggcgcgccatgttcgccggcctcgccttcgcccgccagacggatccggtcaccggtatccacgcccgccggaattttaaccgacagggttttgatcttttctacgcggccatggccatgacatttattgcacggatctttaatcagcgtaccgcgtccctggcagtgcggacaggtctgctgtaccgcaaaaaagccctggcgcatctgcacctggcctgcgccatgacaggtcggacaggtctgcggtttgctgccggccttggcgccgctgccgtggcagacgtcgcactcttccagcgtcggaatacggatctctttagtgacgccgcgcaccgcttcttccagcgtcagctccatgttgtaacggagatcggcgccgcgtgccgcgcgctgacgaccacgtccgccgccaaagatatcgccgaaaacatcgccaaagatatcgctgaagtcggcaccgccgccaaaaccgccgccgccgcccatgccgccctgttcgaaggccgcgtggccgtactgatcgtaggccgcacgcttctgggcatcagtcaggatttcatacgcttctttgatttctttaaatttggcttcagcctctttatcaccctggttgcggtccgggtgatatttcatggccaggcgcttataagcctttttgatttcacgctcttccgctgttttggaaacgcctaaaatctcgtagtaatcttgctttgccatcggtgtttttcagccccttaacatgcgtgcacgggcggagaggaaacctcttcgcccgtgccagtgttttacccgttcaaagggcgattattttttatctttcacttcttcgaactcagcgtcgacaacatcgtcgtctttcgcgttgctcgcctgagcgtcagcggaacccgcctgctgctgagcgtgctgctgctgagcaatttccatcagcttctgagaagcctgcgccagcgcctgcattttcgcttcgatatccgctttgtcttcgcctttcagagaagattccagcgcggtcagcgcagactcaatggcagttttgtcgtcagccggcagtttatcgcctgcttcttcaacctgcttacgagtgctgtgcagcagatggtcgccctggttgcgggtctggaccagctcttcgaacttacggtcagattcggcgttagcttctgcttcgcgaaccattttctgaatttcttcttcattcagaccggaagacgctttgatggtgatcttctgctctttaccgctgtttttgtctttcgcggagacgtgcaggataccgtcagcatcgatgtcgaaggtcacttcgatctgcggcatgccgcgcggcgccgggttaataccatccaggttgaactgacccagagatttgttatcagacgcgcgtttacgctcaccctgcagcacatggatggttaccgcagactggttgtcttcagcggtagagaacacctggctgtgcttggtcgggatggtggtgtttttgctgataagcgcagtcatcacgccgcccatggtttcgatacccagcgacagcggggttacgtcgagcagcagaacgtctttcacatcgccagtcagtacaccgccctgaacggcagcaccgatcgccacggcttcatccgggttaacgtctttacgcggttctttaccaaagaactcggccactttcttctgcaccatcggcatacgagtctgaccaccaacgaggatcacgtcgttgatatcggaaacggacagaccggcatcctgcagagcgactttcagcggctcgatggaacggttaaccaggtcttctaccaggctttccagtttcgcgcgagtcactttgatgttcatgtgtttcggaccggtcgcgtctgcagtgatgtacggcaggttaacgtcggtctgctgagcagaagacagttcaatcttcgctttctcagcggcttctttcaggcgctgcatggccagcgggtcgttgcgcaggtcaatgccctgatctttcttgaactcatcaacgaggtagttgatcagacgagtatcgaagtcttcgccgcccaggtgggtatcaccgttggtcgccagaacttcaaaggttttttcgccatcaacttcgtcgatttcgataatcgagatatcgaaagtaccaccaccgaggtcgtaaaccgcgatagtacggttgcccacttctttatccagaccgtaagccagcgcggccgcggttggttcgttgatgatacgtttgacttccagaccggcgatacggccggcatctttggttgcctgacgctgcgcatcgttgaagtaagccggtacggtgataaccgcttcagttaccggttcacccaggtaatcttcagccgttttcttcattttcttcagcacttcagcagagatctgcggcggtgcagttttggtgcctttcacatccagccatgcgtcgccattgtctgcggcaacaattttgtatggcatgatagaaacgtcacgctgaacttcttcgtcctggaagcggcggccaatcaggcgtttaatcgcaaacagggtgttttgcgggtttgtcactgcctgacgtttagccggctgaccaaccagagtttcaccatcctgggtataggcaatgatagaaggcgtggtgcgatcgccttcggcgttctccagcacgcgtgcagtagtgccatccataatcgctacacaagagttggtagtacccaggtcgataccaataattttacccatctaaacgtctccactaaaaattcgatcaacatgtggttgtgaacctgtaataagggcgaaacgtgcggtttcaactgcccagacatcattttttttcaggttcttcactgcggttgactacaagatggggtcgcccactccggcatcaaggggcaagcataaaaattttttgcctcggattcgcacagggttacggatgacttgccgaacaaggttgttggatggcaaaaacgacggcgaaatatacatacaaaaaacggattaaaataggaaatacattcataatatcattgacataacccgcaatacttgcgcgctaaaagccccgttttcgcagtgataaactcccccgccatcgcacttcgcttattcaggggacaaattaatgaaatcgctataccggctttccgtagggcttatcctcggcgtgtcatttatcacctcggcggccgctaacgaccataaaattctcggcgtgatagctatgccgcgcaatgaaaccaacgacctgacgctgacgcttcccgtctgccgggtggtcaaacgcattcagctcagcgccgaccgcggcgatgtacaactctccggggcgacggtctactttaagaccagccgcggcgccagccacacgctgaacgtccccgccgggatcaaagagggcagcaccaccggctggatcaaaatcaatagcgataacgacaacaaacgttgcgtgaagaagatcgccttctccggccacacggtgcactcctcagatatggcatcactgaaaattatcggcgatgactaatgtcgcccctgcccgagagaaaacgttatgcatattaattacctggaggatgacgatctcgcctttctgcctgagtgcagcgaggcgcatctggaagcctttacccgcattctgacccacggggaaaatggcaaaccccgtctctccagcacgctcctgcgcaacgagacatttttagcgatggagggtcacccggagcgttatcgccgcaactggcagctaatcgccggtgagctacagcattttggcggcgatagcatcgccaacacgctgcgccgccatggcaaattttatcgcgcgatcctgctggatgtatgtaaacgactgaaagcgaaggtcgacaaacagctgtcgacgccgcagatcgagcagcagttgctggcgcattttctgcagcacagctggaataaactgaacgcggagcaaaaagcgcactttctcgccgcggtggagtgccggagccatgagctggacagcctgatggctcatctgctgaggcatcgcaagctaagcgaaggcgtcactttgttgctggacgaacgcttaaccgccatcctgcgcacgcacgccgcggtgagcgtcatcggtcatggcctggtgcgcggcgccgggctgggcggaccgctcggcgccgcgctgaacagcgtgaaagcggtgagcggcagcgcctaccgggtcaccatccccgcggtcctgcatattgcctgtttacggcaaatgctccagccgccgtcagacaccgcggaaattggtgaaaaataccccgccagatcatagacagcccatcagcgcctcattattatgccgcgccccgccgccaagtcgcggggtaatgcttcccttttaatgataattttgaggaattatgggcaacactaagttggctaatccggcaccgctgggccttatgggcttcggcatgaccactattctgcttaacctggcgaatagcggcctgttcgcattcgatgtagctatcctggcgatgggcattttttacggcggcattgcgcaaatttttgccggcctgctggaatacaaaaaaggcaacacttttggcttaaccgcttttacctcctacggcagcttctggctgacgctggtggcgattcttctgatgccgaaaatgggcctggcagacgcgccaaacgcgcacttcctcggtatgtacctcggcctgtggggcgtctttaccctgtttatgttctttggcaccctgaaggcagcccgcatgctgcagtttgtcttcctgagcctgaccgtactgttcgcgctgctggcgattggccatttggccgataacgaaggcattgtgaaggtagccggctgggtcggcctggtttgtggcgccagcgctatttacctggcgatgggtgaagtgctgaacgaacagttcggccgcaccgtgctgccgatcggcgaaccgcgctaatcttccgccgccgtccggtcacagggcggcggcaggtcattatcagcatcagctagccatcgttaacgctgcagctccccttccggcatccccgtcggcgccgtcagctcctgacgcagccagatacctaatcccagccccatcagcgacagggccagcacataccaggccggcgccatcggcgacacccccatcagcatggtgaccgcaatcggcgtcaggccgccaaagatcgcgtacgacaggttgtaggagaaagagatgccggtgaagcgtacttccgccgggaaggcccgcaccatcacatagggcaccgcccccaccacgccgacgcaaagccccaccgtaccgtagagcagaaacagccgctgcgggctggcgccggcaagatggtaaaatgcccagctggcaaccgccagcagcaggctgccgacgataaaagtgcggctggcgccgaagcggtccgccgccagcccggcgagcagacagccgatgcacaacataatggtggcgatgctgttggcctgcagggtaatggccggcgcaaaaccatagtgcttctgcagccagaccggcgacatcaggatcaccaccaccacgccagccgacagcagccaggtcagcagcatagagatcaccaccgccttctggtgcttgagcgccaccgcttttaccggcagctcctgcgccagcgctttgcgctgctgcatctcaagaaaaatcggcgtctcctgcagccagcggcgcagatacatcgctatcagaccaaatacgccgcccagcaggaaggggatccgccagccgccgtcgtggatcccctgcggcgtcagactggtattgataagcgtggccaccaccgaccccagcagaatgccaaccgtcaggccggccgtcagcgtgccgcaggcgataccaatgcgtttttccgggacatgctcagcgacaaacacccaggcgcctggaacttcaccgccgatcgccgctccctgcagaatacgcatcagcagcaatagcagcggggcgatgatacctaccgagctataggtcggtagcagaccgatcgccagggttggcagcgccatcagcaggatgctgagggtgaacattttcttgcgccccaccagatcgccaaagtgggccatgatgatgccccccagcggacgcgccaggtaaccggcggcgaaaatgccaaaagtttgcacctggcgcagccattcgggaatatctgcgggaaagaagagctcgccgacgacggcggcgaagaaaacgaaaatgataaagtcataaaactccagcgcgccgcccagggcggccagcgtcagcgttttataatcctggcggttgagcggtcggtttgcatatgacataacgcaatttcatcctgaggtgtgcagcgtgttttatagtgtgtaaagtaaaaatcactatatcgtaaataaaacggcacaccattagcgatgcaggttatatcaaaaatgcatcaaattcaggataaagtttcgcgtctggcactcttgggacgaaaagcttctactatacggccatcggtttccacataaggcccttcaagcaactgtacacaataaggtacacttgcgaaaataccgtgcaccagcacgttgccgtcagcatctttcaccccttccagagtctcctgaattgctttcggttgcccgggaaggttgaggatcagcgcctgcttgcggatcacaccgacctgccgggaaaggatagccgtcggcacaaagtgtaggctaacctggcgcatttgctcgccgaagcccggcatctcgcgatcggcgatcgccagcgttgcgtcgggcgtcacatcgcgacgcgcagggccggttccgccggtggtcagcaccagatggcaccccatttcgtcaaccagttcgcacagcgtttgctcaatgatggcctgctcatccggaatcagacgggtttgcagctcgaaaggggtggtcagggcacgtgccagccactcttccagtgccgggatgcctttgtcctgatagacgccgctggaggcgcgatcggaaatggaaactaagccgattcgtaaggtattcatggttattccgttcaaactgtggcgttaaacgaaatgatacactgccggaggcgggacagacagtgtaatgtggccgacgggcgtcggccacctgcgcgattacagcagttcgtcgatcattttttccagtttttcctggtcgatcgcaaacttacggataccttccgccagtttgtctaccgccatcggatcctggttatgctgccacaggaactcagattcggtaatacgctccggacgcgctttcacttcaccggtatataccagcttacgctcaacggcgccttcgctttcggacagctctttcagcagcgccggggcgatggtcaggcggtcacagccagccagttccagaatttcgccaacgttacggaagcttgcgcccatcacgacggtttcatagccgtgctgcttgtaatactcgtagatttcgctgacggaaaccacgcccggatcttctgccggtgcgtactctttcttgtcggtgttggctttgtaccagtcgaggatacggccaacgaacggcgaaatcaggaagacgcccgcttcggcgcaagcgcgagcctgagcgaaggagaacagcagcgtcaggttacagttaatgccttctttttccagctgttcagcggcgcgaatgccctgccaggtggaggccagtttgatcagaatgcgatcgttgctgatgcccgcgtcgttgtacagcttgatgatgcgcttggctttcgcgatagacgcttcggtgtcataggagagacgtgcgtccacttcggtggagatacggcccgggatcagtttcagaatttcgagaccgatgttcaccgccagcttatcggaagcatcgaggatctgctgcgcgcgatcgctgctctggctacgagcccaggcgacagcgtcgtcaatcagcttacggtactcagggatctgagccgcgccgagaatcagggaagggttagtggtggcatcctgaggctgatacagcttcattgccgcaatatctccggtgtcagcgacgacagtggtgtactgacgcagagaagttaatttatccgtcatgatatatttctcttaaacagcagttaaggggatgtaaccggtctgcccagatgataacacgctgccgggtcagcgcaaccgccgacgagagaagagcgcagagtgtgataaactatgcagattaatttgctgaaagcgaaaggattgtcacttaattggtaacgcttacactggcgtaccggcatggacaagaggatgtttaatgcctgattttctctcatttatcaatgaaatactctggggctcagtgatgatttatctgctactgggcgccggtatctggtttagctggcaaacccggggtattcagtttcgttacgtgcgcaaattcggccgcagtctaaaaaaaagcctgcacccgcagccgggtggtttaacgtcctttcaggcgctctgtaccagccttgccgcccgggtcggcagcggcaatcttgccggggtgacgctggcgatcgacgccggtgggcccggcgccgtattctggatgtgggtttccgccctgctcggcatggccagcagctttgctgaatgttcccttgctcagctgtataaagaacgcgatagccgcggacagtttcgcggtggccctgcctggtacatggcgcgcgggctcggcatgcgttggatgggcgtcctgttttcgatcctcctcctgctggcctatggttttatcttcaataccgtgcaggctaactccgtggcccatgccttgcgctatgcgttcgatctgccggcggcggtcagcggcggcgtgctggccgttgtcgttttgctggcgatcctccgtggtttacgcggcgtggcgcgtctgatgcaatggatcgttccctttatggcgctgttgtggatcgccaccagcctgctcatcggcctgtggcacatcaccgccctgccgacgattttcgccaccatctttcgctgcgccttcggctggcaggaggccgccgccggcgcggtgggctacaccatcagccaggcgctgaccagcggcttccagcgcggcatgttctccaatgaagcagggatgggctcttcgcctaacgccgccgcggccgccgcctcctggccgccgcacccggcggcgcaggggatcgtgcagatgattggcgtgtttatcgatactatcgtgatctgtaccgcaagcgcgattatcgtcatgctggcgccgcggcccgacaatgaatatacgctcaacggtattcaggacttgcaacacgcgatgagcgtgctggtcggcggctggggagcgggttttatcgccctcatcgtgctgctgttcgcctttagctctatcgtagccaattacgtgtacgcggaaaataatctggtcttcctgcgcctggataagccccgctatatctgggggctgcgaatactcaccgtcctgatggtgctgttggggaccatggttagcctgcctgtcgtctggcagagcgcggatatcatcatggcgctgatggcgatgaccaacctgacggccattctgctgctctccccgacggtgcggattatcgccagcgattatctgcgtcagcggcggctgggtatccagccgactttcgatgccactcgttacccggatattgaccaacagctggccccgggcgcctggaatgaattgccgcgcgaatagcgcggcaattgcagctatcgatcccaccatgcactttttttgttaaaattcgtcgaaattacctgcaaggactggatatgctgattctgatttcacctgctaaaacgctcgattatcaaagcccgctggcaacgactcgctatacccagcccgaactcctcgagtattctcagcagcttatcggcatcgcccgtaagctgagcgcaccgcaaatcggcaagctgatgagcattagtgacaagctggcggatctaaacgccacccgcttccacgactggcaccctgactttacgccgcaaaacgcccgccaggcgatcctcgcctttaaaggcgatgtctacactggcctgcaggcagagacgctcaccgaggacgactttgacttcgcccagcagcatctgcgcatgctctccgggctgtatggcgtgctgcgcccgttagacctgatgcagccctaccgcctggagatggggatccgtctggaaaatccgcgcggcaaagatctgtaccagttctggggggataccattaccgagaagctgaatcaggcgctgcgcgaccagggcgacgatatcgtcatcaacctggcttccgatgaatattttaaatcggtgaaaacgccaaaattgcagggtcagctgatcaagccggtattcctcgatgagaagaacggcaaattcaaagtgatcagtttttatgcgaagaaagcccgcggcctgatgagtcgctacattattgaaaaccgcttaacccagccggagcagctcaaagcctttaatagcgaaggctatttctttgatgcggatgcctcagagaaaggcgaactggtgtttaaacgccacgagcagtaacacgttacggtaataaaaaaggggagttattccccttttcaatataattaagcagattattacttattttaacgcacccagttttccaccacgcctttttcatcgaagaaaatcatcagcgagttcgaatctttttggctggacttatcgaccgcatcggcagcttgcgatgccccggttaccgggatcatggaacccgcgaggctgaccaggttgatccctttatctactgaataataccagctctctttacccgacgccgtcaccgtcgtatgaccagaatccggagcaccaaaatactgacgaacctcggccttggtggtttttccgacaatgagatgttgtttcagataggctggcgttaatttatcttcattaccgccaatcgttgtcccggagcagcctgttaaagcgaacaccaccaaaaaaagagataaaatacgcatgtttcctccttgaaaaccttgtgcattaacaatgcatctataacaaatgatatctatagctgcttcataataaaatcagcagcataaatataagcagcatgaaataataaataaaaaagataatccagtggaattatccggcaaagaggacaatccgtaaaagagtttgcaataaaagcagtgcgctgacaataaaatagtgtggggaattttatggagagaaattttactgatatggaaaagtgcgttaaatataaaaaccgggcaatagctgcccggtttggtcgatcatgttgccgatattattgcctggcttagcccatcatcagcttacgcagcgcggcgaaatccgccggcaggttgtgagacagcagcggcaggtcggcgcggtcggccagctccttcggcagcggcagagtctcctgcaggatctcctccacgctctctttgaacttcgccggatgggcggtgccgaggaacaggccgtactctcccggctgcagctgatcgcgcagcgcgcgccaggcaatcgccgcatgcggttcagagatgtagccgatggccttcagctcgcgcatcgctgctttggtggtctcatcatcgaccgcggcatagcccagctcgctgagacgccagattttacggcggaacagctcttcaacgcgcggccagttgttcggctggctgacgtccatggcgttggacagcgtcgcctgggtggcttttggcgcccactcgccgccctgcagatagcgcggaacggtgtcgttggcgttggtggcggcgataaagcgcttgatcggcagccccagcgacttggccagcagaccggcggtcagatcgccgaagttgccgctcggcacggaaatcaccagctgattgcgggcttcctgcggcagctgcgccgccgcttcgaaatagtaacagatctgcgccagcaggcggctgatgttgatggagttagccgagttgagacccagcgtcgccttcagctcttcatcgtcaaacgcctgcttcaccagcgcctggcaggcatcaaagtcgccatcaatcgccacggtttcaatattgccgccgagggtacagaacagcttctcctgcagcggactgatcttgccgcgcggatagaggatcactaccttgacgttcggcaggccgtagaaagcatgcgccaccgccgccccggtgtcgccagaggtcgcggtgaggatggtgaccggcttatcgcctgcgatgtgggtcagcatctgcgccataaagcggccgccgaaatccttgaacgccagcgtagggccatggaacaactccagacagccgacatcttcctgaaccttgcttaccggcgccggaaacgcaaacgccgcgcgcacccgctgctgcaggacatcctgcgggatctcatcgccgataaaggcggatagaattttggcgctacgggtgacaaagtcctgcgccagcatgtcgtcgatttcagtcaggctgaattccggcagatcgtgcggaaagaacaggccctgatgcttgccaagtccctgggtgacggcctgcgcaaagctgacctgctcgttatgatcttttaagttatacagtttcattggttatcccactacgcgtgcgcccgccgtgtccagccggcaaatatgaacaaagccttcctgattctgcagatagtgcgcgccaagccagtcggcgacgcgctgcgcggtatccggtttatcacacaacgcgaacagcgttgggccagagccggagatgccgcaagcctgggcgcccatctccatggccgcctgacgcgcttcgctaaagcccggcagcagtttggttcggtacggttcggcaatcacatctttcatcaattttgccgccagctgcggctggcgggtgtagcaggcgtgaataaagcccgcgaggtggcgaccatgggcgatacaatcctggcggcgatactgcgccggcagaatcgcccgcgcttcagcagtagagactttaatccccggataggccagcacccacagccactcatcaaacccgggcacctgctgactgataatcccattctcttcgatcatcaactgcatgccgccaagatagcacggcgccacgttgtcgtagtgaatgctgccggagatacgcccttccatctctcccatcagcgccagcatgcgcgtctcgttcagcggcttgccgcagaactcgttcatggccaccagcgcagcgaccaccgagcaggcgctggaacccagcccggagccaatcggcatgtttttttccagcgtcatcgccaccggcaccgtcttgccgatctcccggcaaaagctttcccagcactggtaaacaatgttctcctgcggcgccgtcggcagtttgctggcgaagcgtccaagattctgcaggctaaattgctccgccgcttcgacagtgacgttgtcgccaagcagcgtgccatcgaccggcgtgaccgccgcgcccaacacatcaaacccgacgctcatattggcactggaagccggggcatatactttgaccatcttaaactcctaacttccaggacagggtgcgcagcaggtcggcgaatacgccggccgccgtgacgtcgttcccggcgccatagccgcgcagcaccagcggcaatggctgataataatggctataaaaagccagcgcgttctcaccattcttaactttgaacagcggatcgttgccgtcaaccgcggctatttttacccggcaggtaccatcctcttcgatgttaccgacgtagcgcaagactttaccttcatcgcgcgccttagcaacccgcgaggcaaaaccatcatccagcgacggcaggcgggccataaaggtctcgacatcgccgctggcgtcgaagtccggcggcagcgccgactcgacgataatgtccgccagctccagttcacgcccggtctcgcgggccagaatcagcagtttacgcgccacatccaccccggataaatcgtcgcgcggatccggctcggtataccccatctcacgggccatcgccgtcgccgcggagaaactcaccccctcgtccagcttgccgaagataaacgacagggagccggacaggatcccggagaaatggcgcagctcatcgccggcgttgagcaggttctgcaggttctcaatcaccggcaggcccgcgccaacgttagtgtcatagaggaacttacgccgcgagctgctggccgcatggcgcagctggtgatagtaatccagcgaagaggtattggcctttttgttcggcgtcacaacatggaaaccttcgcgcaggaagtcggcatactgatcggcgaccgcctggctggaggtacagtcgacgatcaccggattgagcaggtggtactctttcaccaggcggatcaggcggccaagattaaacggctctttcgcctccgccagttccgcactccagttttccagattcaggccatgcacgctggtcagcagcgcctgagaattggctacaccgcagacgcgcagatcgatatgtttgttcttcagccacccctgctggcgcttgatctgctctagcagcgcgccgccgacgccgccgacgccgatgacaaacacttcaatcacctggtcggtgttgaacagcatctgatgggtcacgcgcacgccggtggtggcgtcgtcattgctgaccactaccgaaattgagcgctcggaagagccctgggcaatcgccacgatattgatattggcgcgggccagtgccgcaaagaatttcgccgagataccgcgcagggtacgcattccgtcgcccaccacggagatgatcgccagacgctccataatcgccagcggctccagcagcccctctttcagctccagataaaactcatcttccatcgcccgtttggcacgtgcgcagtcgctctgcggcacgcagaaactgatgctgtactccgaagaagattgagtgatcaacaccaccgagatgccagcgcgggacatggtggcgaagacgcgggccgccatgccgaccatccctttcatccccggcccggagacgttgaacatcgccatgttgttgaggttagagatgcctttcaccggcaaatcgtcctcgtcgcggctggcgccgataagcgttcccggcgcctgtgggttgccggtatttttaatcaggcatgggatttggaactgggcgataggggcgatggtgcgcgggtgcagcactttcgcgccaaagtaggagagctccatcgcctcctgataagacatcgatttcagcaggcgcgcatccggcacctgacgcggatcgcaggtgtacactccgtcgacatcggtccagatttcgcagcagtcagcgcgcaggcaggcggccagtaccgcagccgagtagtcggagccgttacgccccagcaccaccagctcgcctttctcattgccggcggtaaacccggccatcaggatcatatggtctgccgggatctggctggcggcaatgcggcgggtggattcggcgatatcgacggtggattccagatagtggcccacggcgagcagtttttcgaccgggttaatgacactgactttatgtccacgggcttccagcagacccgccatgatggcgatggagagcttttcgccgcggcagatcagcgcggcattgacgctgtccgggcactgacccagcaggctgatgccgtgcagaacatgcttaatctgagcaaattcctgctccatgaaggcttttaactgggcaagcgggaaagcgggctgggcgtcggcaaggccctgaagaagttcggcaaaaatgcgttcggcgtcggcaatattggggagggcatcctggccgccaatggtcttttcaatcatcgctaccaggtggttagtgatcttcgccggggcagacaggaccgtcgctacctgcccctgcctggcattactctccagaatatcggcaacccgcagaaaccgttccgcatttgccactgatgtaccgccgaacttcaacactcgcatggttcttaccccttgatctcttgtcaaaaaaaaagcccgcactgttcaggtgcgggcttttttctgtgtttcctgtacgcgtcagcccgcaccgttacctgtggtaatggtggtggtgataatggtggtaatcatgccgatgcgattcatggatgttgtgtactctgtatttttatctgtctgtatgtcctgcctatattggttaaagtatctgccgtcttaagtcaatgaatttctcaatttgccccatttcagcaggcttacgtattttcccgctgccgtgagaaaaaacatccagatcggcggaaaaccagcccatagaacagcatacacatccataaataaaaaatatgacagagttttattctggcaggtttttttcaatatcatgcagcaaacgatgcaacattgccgtgtcgcgctgctgcagcaggcccagccgttgcgacaaccagtcggccagtttggcatcatcctccacgcccaaacgcgaaagtaacgccagggtacgagtacgtaaggcctgcagctgatgatggtctgccgcagcggcggcgggcgccgtttgttgcattagcgatgctaattgataacagtagaccatcaccgactggccgagattcagcgacggataatccgcagccatcggcacaccggtcaacacatcagccaacgccagctcctcattggtcaatccggcgtcctcacgaccaaataccagggcagtatggttcatccactgcgccttctcctccagcagcggcaacagctgctgcggcgtggcgtaatagtgaaaacgcgcgcggctgcgggcggtggtggcgacggtaaaatcaacgtcatgcagcgcctcggcaagggtgggataggtggtgataccatcgaggatgtcgcctgagccatgcgccacccagcgtgccggaggcgccaggtgggcttcgctatcgacgatccgtagttcgcgaaatcccatggttttcatcgccctggcggcagcgccgacgttctcggcccgggcaggaccgactaaaataatcgttaaacgcattgcggtttctttctctctctcaggcgttatcgaggcgcagcgccccccattttacgcggtgaaaatttacaaatttgcaacaaaaatcactaaaattgcgttttcttacccataaaaaaatctaaactgttctcaggaggccgtgacaaggagtatgttaacagaacccatttatccatatgatgggcaatgcaatttcatctgatgcatcgtttcaggctttggattcactgtatttattaatttatccacgcaactagttgagccgggtaaagattgtgactataaagagcatggcgatgcaatgatttcacaagactgttaacgtgctacaattgaacttgatatatgtcaacgaagcgtagttttattgggtgttcggcctctcttagcctgttatgttgctgttaaaatggttaggatgtcagccgtttttgacaccgtcgggtccagagggaaagtacccacgaccaagctaatgatgttgttgacgttgatggaaagtgcatcaagaacgcaattacgtactttagtcatgttacgccgcgcatgttaatttgcgacatgcagcaggcaggtcagggactttggtacttcctgtttcgatttagttggcaatttaggtagcaaacatgcagaccccgcacattcttatcgttgaagacgagttggtaacacgcaacacgttaaaaagtattttcgaagcagaaggttacgatgtattcgaagcgaccgatggcgcggaaatgcatcagatcctgtctgaaaatgatatcaacctggtgatcatggatatcaacctgccgggtaaaaatggtcttctgctggcgcgcgagctgcgcgagcaggctgacgtcgcgctgatgttcttaaccggccgcgacaacgaagtggataagatccttggcctcgaaatcggcgctgacgactatatcactaaaccgtttaacccgcgtgaactgactatccgcgcgcgcaacctgctctcccgtaccatgaacctcggtaccgtgagcgaagagcgtcgcagcgtggaaagctacaagttcaacggctgggaactcgatatcaacagccgttccctggttagcccgaacggcgaacagtacaagctgccgcgcagtgaattccgcgcgatgctgcacttctgcgaaaacccaggcaaaattcagtctcgtgccgagctgctgaaaaaaatgaccggtcgcgagctgaagccgcatgaccgtaccgttgacgtgaccattcgtcggattcgtaaacacttcgaatccactccggataccccggaaatcatcgctaccattcacggtgaaggctaccgtttctgtggcgatctgcaggaataatacgatttattccgcagccatgatgcgaaaacggcgccccaggggcgccgttttttatgccgtcactctttccagagacgcagcttatcgtcatcggcagccggtgtcggaggcactgtgcctttcggcagcgataacgcataccagtccacgcgacgggtcaaaaacatcaggacgctcagcgccagcgccagcaccccggtacccagcagcagcgcgctatcctcagaatgcaacagaaaccacatcacgccatccagcagcagtagcgcggcgacaaacagcaggctgttacgccatcctctgagcactgcctgaaggtagatcccattcatcaccgcgccagacaggctggccgccagccaggcggcggtaaaaccaatgtgctctgagagcgccagcagcaccaggtaaaacagcaccagcgataagcccaccagcagatattgcatcggatgcaggggacgacaggtcaggctctcgaacacgaaaaaagccataaaggtcagcccgattaacaggatggcatattttgtcgcccgatcggttagctggtactggtcggcaagggacatcacatcggcactgaacgccggcagtcgcgaccacgggatctccatatcatccttgaaatagctccccatatcgttggcgaaccagctgctttgccagtgggcgcgatagccggcagcactcacttcccgttgcgttggcaggaagctgccgagaaaaccgggatgcggccagttactggtcagctgcagctcgctgttacgcccgagcggcaccagtgaaaactctcccgtcccgttcagatcgagtgaaaaggcaatctcaagcggcttgttgtcctccgccagcgcaggcattggcatatgaatacctgcgccatcgccgcttatccccagccccggctccacgcttaatacgttaccgttgacctccggggcatggatggcgccaatgccgcgggcatcgccgacgctcaccaccagccgcggctggcctaagacgatattcgtttttctcagcgccgccagacgcagcggatcaaacgaggccttaatctgcaaggcgttatgccagacctggccgctgtagataccccccctcctcgactccacggtctgtttgccggcgaccgccagcgactccggcagccagtaatacacccagctccgctgatagttgacctctttttggttctccatgcgggtcagggtctcggttatcggaatagcgatcagcggtccggcgagtttttgcgagccgctggtgctttgctcaatggcgtccaccacttcgctacgataatccgctcgctcattaataagctccctgaccatcattaacggcaaagatagcagcacaatacagcctattaacgtggtgattttccagaataacggtgatttcaacatagcctttctccctatcgtgatggcctcacaataggacggctgtgtggggagaatttgaagctatgtgaagggacggtgaagtcgcagcgtggcgaccacgccgccttcgggccgattgtgcagattgatatcgccgtgatgcaggcgcgcgacttcacgaacgaacgccagcccaaggccgctgctcttatggccgtcttcgcgcggcagcgaatagaatcgctcaaagattcgttccagggcatagtccggaataccgcacccgttgtcgataacgctcaattgcacctcttcatttcgcttctccgcagccagggcgatctcaccgccctggggggtaaagtcaatcgcgttgtcgagcagattacccagcgcctgggccagcagctcgccatcgccattgaccagcatcccactctcccgccagcgcagggtgatagctttcgccgccagagcgatgttgcgctcctccgtcagccgttggtatagcgcatctatcgacaccggctgctgctttatctccagccggctttccagtctcgcctgctggagcagccgctccaccagcagttgcatccgggtgttttgcgcgaggatattatcagtaaaccgcgccgccacctcaggcggcggcccttcgcgcaggatctccgccgcgccgcggatggccgccagcgggcttttcagttcatgggtcaggtcatagacatagttttcgatggcattcttaccttcgagctttacccgcatgctctccagagcctgggccagcttgcgcaattcgctgctgccaacctccggcagcggcagcgggcgctcagcggtcaccgagtccgcatagcgcaccagcttgccgatagagaaattgatccaccagacgacgccgccgccaatcaacagcgcaatgcccagcagggcgccgccggcccagaggatccgccgctcgctgcgcttaatgaccggcgtcatcgccaggttgggtttaccgacgctcagcacgccgataatccgccccttatccatcaccggcgcggcgatatacatcaccgagctggcttcatcatgcggatcgctgcgcgtactgcgcgcgccgtactggccgcgcagggtgagccagacatcgttccagcgcgaatagtcctgccctgtcgcctgcccgctggagtcaaacaccaccttgccccgggcatcggtcagatagacgcggtactcattacgtacctttttaattccgccaatattggcgttgagcggctgctggttgagctggtgaaaggcctgcgccagcctgccctgctgcgggtttgccgccagcagatcctcacgcgccagcgccgccaacagggtagcggtatcattgagggtcccctctgtcgcccggcgcacgcccggcttcacttcctggacaaagatcgacagcacaaaccacgcggcgatcgcgacgataagaaaatagcccagcagcaggcgcatgccgatgcgcatcagccgcgccccaggctgtagcccataccgcgatgggtattgattggcgccttttcaggattcacagcccgcagcttagcgcgcagggttttgatatgggtatcgacggtacggtcgaggctttcccaggcatcgctccacaccagctccatcagctgctgacgggagaagacgcgaccgggcgcgtgaagcagggttttcaacagcagaaattcgtagcgcgtcagattcagcggctggccgaaccagctgatcgccgccgcctgctcatcgagcacaaactcgccgacgcgtaccaccggcgatggcgcggcaaacttctgcagccgccgcagcacggttcgcacccgcgcgcagacttcgcgtggtgaaaacggcttggcgatataatcgtcagcgccgatttccagccccagcagcttatcgacctcgtcgctacgcgccgtcaaaaacagcaccggcagcgccggataacgcgtcagcagacgccgacagagctcgaagccgctgatatccggcaagccgacgtcgaggatggcgacatctggcgcctgatgcgccgccgcctccagcgcgggcaaaccgcggccaaagacgctgacctggaagccctcctgctgcagcatgtaaaccagggtatcagcgatactctgttcatcctcaactaaccaaatccgtggctgctgcatgcgcgctcccgtttatttattccatggcatgatcggcacggcgctgatggcgttcttcggcgagccatcaaccactttatccgagtaggtcagatagaccagcgcattgcgcttcgcatcatagaaacgcacgacctgcagttttttaaacaccagcgaggtgcgcttctggaacaccacgtcgccctggcttttgccgtttttgattttgtccgttagctcaatcggcccgacctgctggcaggaaatcgccgcgtcagaggtatcttccgccagccccagcccgcctttgataccaccggtttttgcccggctgatatagcaggtcacgttctgtacatccggatcgtcaaaggcttcgacgacgattttgtgatccggccctaaccatttgaagaccgtatccacggaaccaatctgctccgcctgagccagctggctaccggccagcaggagcagccccatcgcaaacttcttgtatttcatattgttaccattattaaaaaatatagctgagtgattatcacgcacttagcagaaaaggtttatagatcacagctttacaaaattatcgttcaaatcccctgacctaccgcatttaaaagcaaaaaaaacactgaatgctaaaacatcaaaaaatgctattatccgctactttaatatcaggcacctgtgtttaaggatggggacattttatggatcaagcagggattattcgcgatctccttagctggctggaaggtcacctggatcagccgctttctctggataatgtggcggcgaaggcaggttattccaagtggcatttgcagcgaatgtttaaggatgtcaccggccatgccatcggtgcctatattcgcgcgcgccgcttgtcgaaatctgctgtcgcattacgcctgaccgcccgtccaatccttgatattgcgctgcagtaccgtttcgactcccagcagaccttcacccgagcgtttaagaaacaattctcgctgacgccggcgctctaccgccgctcgccggactggagctcgttcggtatgcgcccgccgctgcgtcttggcgaatttaccctgccgaaacatgagtttatcactctgccccctactcagctgcttggcgtgacccagagctatacctgtaagctcgaggaaatctccgattttcgtaaccagatgcgggtccagttctggcgagacttcctcggcaactcaccgtcaatccccccggtgctctacgggctgcatgagccgcgtccgagcctggaaaaagacgatgagcaggaagtattctataccaccgcgctgacgccggagatggctaacggccacctgcagcatgcccatccagtgaccctggagggcggcgagtatgtcatgtttacgtatgaagggctgggtaccggtctgcaggaattcatcctgaccgtctacggcacctgcatgccgatgctgaacctgacgcgtcgcaaggggctggatattgaacgcttctaccctgaagatgaaagccgggatcaggccacgccgattcagttgcgctgcgagtatctgatcccgatccgccgttaacgctgcagctcgtccattgcgggggcgtcaagatgcgagacgtcgcccgccgtttccaccacccagccggaagccagccacgggctttgctgatagtcgacgcgcgaaatagagcagttgcgcagccgcagacgacgctcagcgtacgccggcagccctaatatcgtgctcaccaggcagcccagcgcgatcccatgactcaccagcagcggccggctaccggcgggtaattccagacaggatgccagcgccgcatgcatacgctcgctgagctcctgcatcgattcgccctgcggaatacgaccgtccggtgtgccgttgaccagctggcgacgccagccttcttcttcttcgctgagcgagtcgatatggcgcttctccagcacccccatatccagttcgcgcaggcgcgcatcggcgatcacgctgcagccgcaggcttcggcgataatttctgctgtgcggcgggttcgccccagatcgctggtaatgatatgggtgatccccagcgttctggcgcgctcgcccacctgccaggcctggcgctcaccatgggcggtcagcgggctgtcggactgaccctgaatacgtcgctcggcgttccactgcgtttcaccgtggcgaacaaggtatacttgtaacatgctttttttccgttctggactcgttatcaaccgctttcgggcattaccgcctgccctcggggtgatttagagtatactgcgatgacgttagtttattctgagttgttttgattatgcaccatgttgtctcagcgaccactaatcccgccaaaattcaggcaattctgcaggcttttgacgagattttcggcgaaggatcctgccacattgagtccgtcgccgtcgagagcggcgtgccggaacagcccttcggcagcgaggaaacgcgcgctggcgcacgaaatcgcgtcgccaatgcgcgccttgcccagccaaatgccgatttctgggtagccatcgaagccggtatcgacgatgacagcacctttagctgggtggtcatcgaaagcgccggccagcgcggagaagcgcgctcagccacgctgccgttgcctgacgttattcttgagcaggttcgcgctggcgaagccctcggcccggtcatgtcgcagtataccggcatcgatcagatcggtcgtaaagagggggcgattggggttttcaccggcggcagattaacccgcagcagcgtttaccaccaggcggtcgtgctggcgctaagcccgttccataacgctatttatcgctagccagcagcgtctgctccagccactggcgcagctctaccggcgccgatttcaggctgttggacccgcgggtaatggtcgcaattccggcgccgagctcatttttcagctcacgctggctcatctcgccgcgcagcaactcttcgataatgcgcacccgggtacccagggcttcgcgctcgtcgggcgtcagcatcagctgcagcaacggcagatgcagatcctcagcataggcctgctgaagcagggcaacaaagcgcagccactcctgatgacgttgttcggcaacggccgcggaatagggagattgttgggtcatatcgcgccaccatattgagacgggcagcttacgctgcccgtcgaatgtactcttcaacgagtacaaagcataacatacttcccggcgatcagtaacgctggcgccactccgcatcgctgaggatcttatcctgctgccccataaagtagcggtagtaggcgtcataggagaggacattcttcacgtagccgcgggtttccgaaaacggaatactctcgacaaacgccacggcgtcgatccgtccggcgctgttcccctgccagctgcgtacccggcccggcccggcgttataggccgctgaggcgtagatacggttattgccgaactgctgataaacgtactgcagatagctggtgccgatgttgatgttggtttccggatccaacagctgcgacgggccgctgtagccgggaatgctgaacatactgacggtatgcgtcgcggtgcccggcataatctgcatcagtccgctggcgccgaccggcgagcgcactttcgggttccaggcgctctcctgacgggcaatcgccatcgcgtagctctgcggaatatctttgccgctaacatagcgggcaaacaggtcgttataggccagcgggaaacgttcttccagctgatcccacagcttaccggcgatcgtcgcctgcacgctcagatcccaccagtgctgatcgaaggcatagcgcgccagctgcgcctgctgggatttggtgcgactagtgaccaggttggcccattcggtgcgcgcggtgttatccatattccagtacatcagctcacgtacccgcgccatctccggcccggaggccagcgccggatcgatggtgcccgaggctttatcgatgcggaaggtatactcctcgccaagacgctgcgcggcgaccatcgggtagaagcctcgctgttgcatcaacgagcgaaggatcgcctgcgcctcctcatccctgccgcgctccagcagcagatccgcctgccagtagcgccattcgtctttctctttcgcctccatcggcaggcgcgccagccaggtgttgaggccatggcgatcgcccgtccccaacgccatccgtacccgccgctccaccagcggcgtggactgcgaacgcatgattgcgtcatcgcgccagatggcctgctcttcggttacatcgctacccatcaggcgccaggcgacaatatcgcgcagttcctgggtctgatcctcattgagctgctgagcctgtaccagcgaagggatcatcaggcgggcattttccacgtcctggcgggcgacgctggcgaaggcgacggcggccatctgacgggtaaagtccgtcgccccggtggtgcgggcgaaggtgaggacgctgtttggatcgttagccagggcgaccacggcgctggcgatgctctggtagttggcgggcatttgctgggccagcgatttcaccagcccgatattgccggccttcatcgccaggcggatccgttcgagataggccagcggatcctgctgaccggagtcgcgccaggcgctgaacagcggttcacaggcgccgggctgattcttgcccgtcagccacagctctttcgccccgctccaggcctcctgcgactgccccacgctcagcttggcgtagtaatagttgcactgcgcctcggtgctggtcggcttatccgggctaaacgccagcaagccgcgccagtcgctgcgccgggccagttcattcacgaagcgcgaacgtaatgaacgcgcagggggcagcgtcggattggcgtcaataaagtttttcaccaccagcgccggctggttcatcagatcgtcggtgatctgtcggtactgcaaatagggatacaggggataggtgcttaacgtgggcatcagctggtcgactacatccatctgccggttatcccacgcctgcttaatttgtgcgtagcggctgcgctgttcatccagtgaatccgcatgcgccagctgactcaacgtcaacaaaccaacgctggcagccaaaagatgccacgccatttttttggctttttccacaagctcttcctctttccggtgcattttcgcagcatcgtgccgcttaaaaacccctgccggttcggcaggcggctttacttatgctaatcagacaacgctaaacgcgccatgtcctggacatttttttacgcttctgtgaatcctgtcgcctcgctgggattagcgcgcgaaaaaggctacacttcggctttgaactatctatcaaaatagaaagaggcgaagtccaacgtggctcaattcgtttataccatgcatcgtgtcggcaaagtggttccgccgaaacgtcatattttgaaaaatatctccctcagctttttccctggcgcgaaaatcggtgtgctcggtctgaacggcgccggtaaatctaccctgctgcgcatcatggccggtatcgacaccgagatcgaaggtgaagcgcgtccgcagcccggcatcaaaatcggctacctgccgcaggagccgcagctcaacccggaacacaccgtgcgcgagtccgtggaagaagcggtcgccgaagtggttaacgcgctgaaggggctggacgaagtctatgccaaatacgccgagccggatgcggacttcgataagcttgccgcacagcaaggcaagttcgaagagattatccaggcgcacgacggccacaacctgaacgtccagctggagcgcgcggccgacgccctgcgcctgccggactgggatgcgaaaatcgctaatctttccggtggtgaacgccgccgcgtcgcgctgtgccgtctgctgctggaaaaaccggatatgctgctgctcgacgaaccgaccaaccacctcgacgccgagtccgtcgcctggctggaacgcttcctgcacgacttcgaaggcaccgtggtggcgattacccacgaccgttacttccttgataacgtcgccggctggatcctcgagcttgaccgcggcgaaggtattccgtgggaaggcaactactcctcctggctggagcagaaagaccagcgtctggcgcaggaagcttctcaggaagccgcacgccgcaaatctatcgagaaagaactcgagtgggttcgccagggcgcgaaaggccgtcagtctaagggcaaagcccgcctggcgcgctttgaagagcttaacaacgttgaatatcagaaacgtaacgagactaacgaactgttcattccgccaggcccgcgtctgggcgataaagttctggaagtcagccatctgcgcaaatcctacggcgaccgcgttctgattgacgatctgagcttctcggtaccgaaaggcgctatcgtcggcatcatcggtccgaacggcgcgggtaaatccaccctcttccgcatgatgtccggccaggaacagcctgattccggcaccatcaccctgggtgaaaccgttaagctggcttccgtcgatcagttccgcgacgcgatggacaacagtaagaccgtgtgggaagaagtgtctggcggcctggatatcatgaagatcggcaacaccgagatgccgagccgcgcctacgtgggccgttttaacttcaaaggcgtcgaccagggtaaacgcgttggcgagctgtccggcggtgaacgtggtcgtctgcacctggcgaaactgctgcaggtcggcggtaacgtcctgctgctcgatgaaccaaccaacgacctggatatcgaaaccctgcgcgcgctggaaaacgccctgctggagttcccgggctgcgcgatggttatctcgcacgaccgctggttccttgaccgtattgccacccacattctggattaccaggatgaaggtaaggttgagttcttcgaaggtaactttaccgagtacgaagagtacaagaaacgcactctcggcgccgacgcgctggagccgaagcgaatcaagtacaaacgtatcgcgaaataaaacgcaaaaaggcaacgcaagttgccttttttaatgtttgctccctctcccattgggagagggttggggtgagggcaacagcccgcagagcccctacccctgctcgcccatcagctgtttcaccagctcgacgcagcgcaggaaccgggcatcgtagtccgactccttcacatgaacgaattcgatctcgttctctttcagcagcgataccagcaacgactgaaactctttacgatccaccgagctcccaagactgcgcagtccatcggccacccacggggtattgttctccagcaggatcaccaggtcgaagcggtattcatcaatcagcgcctgcacaaacgggtgctcacgtccctcgtacttcagacagaaggcctgagtgctgacgaagtcggtatcgatgaacgccaccttgttggcatatttcaccgcaaaatcaatatactgcgcatgcccaagggcaattttatcgtaatccgaatactggagcgccatctcatcgccgccgagatgcgaaaaaacataatcccggccatattcccaggcgctggtggtattgaagatattggcgagtttattgaccagcgtcgatttaccgctcgactcgccgccgaggatcgccaccgtccgcacaaagaacggtttcacttccgtcggaatatattcccagtagcggaacgggttctcgcggatctgcccgccgctaatattcataaaggtccgcttaggatcgataagcaccgtctcgatccccagatgctcaaggtactgcggcgcatcggcctcttccgaggtatagatccggttcggctcgatccctttttcgctcataaaagcgcggatcccatggctccacacgtcccagccgtgcggatagggctccatcccctcttcattgaaggcgtggatgcgaatattcttctgatatttaaaggtttgcagcagccagcgcaggcggtcaggcaccgtcggctgttgcgacatggcgctctcttcaaacagctcgcggtcacgggtgtcgtcatagcccataatgatatgcagctcatcgacctggctacaggcgcgctgtatcaggtagatatgcccggtatgcagtgggtaaaacttaccaaacaccaccccgacgcttttctgtcggcggggaaactccagcccgaggaaacgatgcagcgcttcaagcttctgcgcactcgggcttttgattttggcattcagcagctggctaagataccccttggtcattccgctggcttccgccacctgctgcagggtacagcctttctgcttaatggcgctttttaaatagtcaaatgacgacatcgctaatctccttttaacttattataagtcgtcaaaaacgcttagcgcgtctgaaagctttttcacgccaaagatttgcatgccttccggcacttttttcggcacattggccgccgggacgatggcgcggcggaagccgtgcttcgccgcttcggagatacgctcctgaccgctcggtaccgggcgaatttccccggccagccccacttcgccaaagaccaccagatcctgcggcagaggacggtcgcgcaggctggagaccatcgccagcagcagcgccaggtcggcgctggtttccgtgaccttcaccccgccgaccacattgacgaagacgtcctgatcggccatctgtaggccgccgtgacggtgcagcaccgccagcaggatcgccagacggttctgttccagccccaccgccacgcggcgcgggttggacatcattgagtgatcgaccagcgcctggatctccaccagcagcgggcgggtcccttcccagaccaccatcaccgagctaccggaggtgatttcatctccccggctgaggaagatagcggacgggttgctcacttcgcgcaggccctgctcggtcatggcgaagacgcccagctcgttcaccgcgccaaagcggtttttatggctgcgcaacgtgcggaagcgggagtcggcatccccgtccagcagcaccgagcagtcgatacagtgctccagcaccttcggaccggccagcgagccgtctttggtgacgtggccgaccatcacaatcgccacgccgcgagttttagcaaagcgcgtcaaataggccgcggtttcccgtacctgggcgacgctgcccggcgacgactgcacgtcggccatatgcatcacctggatggagtcgatcaccatcagctgcggcttttcttcatcggcgatctgacagatctgctcaatgctggtttccgagagcatgttcaggttggccgttggcaacccgagacgatgggcgcgcatcgccacctgctgcagggactcctccccggtgacgtacagggttttcatcccttccgccagtttgcagagggtttgcagcagcagcgtcgatttgcccgcgccggggttgccgccaatcaggatcgcgctgcccggcaccacgccgccgcccagcacgcggtcaaattctttaaagccggtggagaaacgcggcagcgcctccaggctgatatctgacagcttctgcaccttcgacacgccggcgttaccggcatagcctgaaagacgctcgtttctcgccacctgcggcgacgcggcgatgcgcatctcggtgatggtgttccaggcatggcaggcgctgcactgcccctgccagcgcggataatccgcaccacattcattacagacaaatgcgcgttttggagctttcgccacgtttacctcttacttttggttcatgctgcccgagagaatacagaatacccccatcaggtcagcgtggcggatagtcacttccgcctgttcattcactttgggcttcgcgtgataggcgatgccaagccctgctgccttaatcatcggcaggtcgttggcgccatcgccgatagccacggtttgcgccgttgggatctcatacttttccgccagcttgcgcaacgtattggctttatatttcgcatcgacgatatcgccgagcacgttgccggtgagcttgccgtcgcggatctccagctcattggcgaataccgcgtcgagatgcagtttgtcgcgcagatactcggcaaagaaggtgaaaccgccggaggcgatcgccactttccagcccagcgtttccagcttgagcaccagctgcgccaggcccggcatcagcggcagcgcgtcgcgaacctgcagcaaaatactggcatcggcgtctttcagcgtcgccacgcgctggcgcaggctggcggtgaagtccagctcgccacgcatcgcccgctcggtcacttccgagaccagctcgccggtgccggccagtttcgcgatctcatcgatgcattcgatctgaatcgccgtggagtccatgtccatcaccagcaggcccggggtgcgcaaatggggaattttacccaatggcgcgacgtccagccccgcctcatgcgccagtcgcgtcgcacggggagtcagcgaaccggccaggcggatcacctggtaatcctcgaccacccaggaggcaacgatcactaacgcggcgcccagctcacgctgccacgccgtcagccgacgtttatccagaccgcgaccatacagcagccagccgctgcgcccggcgtgataatccagcggcatgacctcgtcgccgctcagggaaagcggcaacccaggccacagggaaacgtcttcaggcaggtcgcaccaggtcaaactgttaggcattacggctccacatctcttcattcaggcgaggaaaataacgcatgaggctaccttgtaaccagcgcttctggcaacattaagctgcaaattttcaaaggtggaatatggttcgcgcaaaactgaaattccggctgcatcgtgcggtcattgttcttatctgtctcgccctgctcgtcgcgctgatgcagggcgcttcgtggttcagtcagaacagtcagaaacaacgcaatccgcagctggaagagctggcccgcacgctggcgcagcaggtggtgctgaatctcgcgccgctgatgcgcagcgagacgcctgacgagaagcgcatcaatcagctgttgacccagctaacccataacagccgcgtcctggacgccggcgtatatgacgaacagggcgacctggtggcgcgctctggcgaaagcgtcgaggttcgcgaccggctggcgctggatggtaaaaaagccggcggctacttcaaccagcagattgtcgaaccggtgccaggaaaaaacggcccgctgggctacctgcgtctgaccctcgatactcataccctggcgaccgaggcgaagcaggtggataataccaccaatatcttacgcctgatgctgttgctgtccctggctatcggcgtggtgctgacccgcacgctgctgcagggcaaacgcacccgctggcagcaatcgcccttcctgctcaccgccaacaagccggttgaggatgaagacgatgaaaagaaaggaaatctataatgtccacattgcgcctcctgctctctgactcttacgatccgtggttcaacctggcggtcgaggagtgcattttccgccagatgcccgccacccagcgggtgctgttcctgtggcgcaatgccgataccgtggtcatcggccgcgcgcagaacccgtggaaggagtgtaatacccgccgcatggaggaagaccatgtgcggctggcccgtcgcagcagcggcggcggcgcggtgttccacgacctcggcaatacctgctttacctttatggcaggcaaaccggagtacgacaaaaccgtctccaccgctattgtgctggcggcgcttaattcactcggcgtaaccgccgaagcctccgggcgcaacgatctggtggtcaaaaccgacagcggcgaccgcaaagtctccggctccgcctatcgtgaaaccatggaccgcggttttcatcacggcaccctgctgctcaacgccgatttaagccgtctcgccaactacctcaacccggaccagaaaaagctgcaggctaaaggcattacctcggtgcgcggacgggtggcgaacctggttgagctgctgccgggcattacccatcagcaagtttgcgaggcgatccaggaagcattcttcagccattacggcgaacgggtggacgccgaggtgatctccccggacaacacgccagatctaccaaattttgctgagaccttcgcccgtcagagcagctgggagtggaacttcggccaggcgccggccttctctcatcttctggacgagcgctttcgctggggcggcgttgagctgcattttgacgtcgaaaaaggccatatcacccgcgcgcaggcctttaccgatagcctgaacccggcgccgctggaggccctggcggcacgcttagtcggctgtcagtatcgggcagaagtattacagcagcagtgcgaggcgctggtcggcgatttcccggagcaggaagcggaactgaaagaactgtcggcgtggattgccggcgcagtgcgctgataaaaaaagcccgctgcgcttagcgggcctggaaaaccgtaggccgggtcagacgaagccgccacccggcacaacagctcttactctttatcgcccagcagcacggattccagcgcgattttgatcatgtcgttgaaggtcgtctgacgttcagcggcagtggtctgctcgtgggtacggatgtggtcggagacggtgcagatggtcagcgctttcgcgccgaactccgccgccacgccgtagatacccgccgcttccatttccacgcccagaatgccgtatttttccatcacgtcgaacatggacgggtccggcgtatagaacaggtctgcggagaagatgttgccgacgcgcgcgtcaacgcccagcgctttcgccgcgtctaccgcattacgcaccatgccgaaatcggcaatcgccgcaaaatcatggtctttgaaacgcagacggttcactttagagtcggtgcacgcgcccatgccgatcaccacgtcacgcagtttgacatcttcacgcaccgcgccgcaggagcccacgcggatgattttcttcacgccgaaatcggtgatcagctctttggtgtagatagagcaggacgggatacccatcccgtggcccatcacggagattttgcggcctttataggtaccggtgaagcccagcatgccgcgcacgttgttcacttcacgcacgtcttcgaggaaggtttctgcaatgtgcttcgcgcgcagcgggtcgcccggcatcaaaacgacgtcagcgaaatcgcccatttctgcgttaatgtgaggagttgccatcttcagttccttttacattgttgtttttgccgggtggcggctacgccttacccggcctacaaatcgtaggcccggatcgctgtgcgccaccgggcaatgacctcagaacatggctttgccatattccatgtcagacgtaccaaagtatttcgcaatagtctggccgatgtccgcgaaggtttcacggtgaccgagcgaacccggtttcactttcgggccgtacaccagcaccgggatatgctcgcgggtgtggtcggtaccggtccaggtcgggtcgcagccgtggtcggcggtgaggatcaggatgtcgtcctcaccaaccagctccatcagctccggcagacggcggtcgaacagctccagacccgccgcgtagccagcgacgtcacgacggtggccccaggaggagtcaaaatcgacgaagttagtgaagacgatagtctcgtcgcccgcttccttcatctctttgatggtcgcgtcgaacagcgcgtccagcccggtggctttcactttcttagtgataccgcagttggcgtagatatcggcgattttacccacggacaccacgtggccgtttttctcatcgaccagcttctgcagcacggtcggcgccggcggctctaccgccaggtcgtgacggttaccggtacgctggaagttaccggctttgtcgcccacgaaaggacgagcaatcacgcgaccaatgttatagccgccttcggtcagctcttcacgcgcgatttcgcacagctcatacagcttgtcgaggccaaaggtctcttcgtggcaggcgatctggaacaccgagtcagcggaggtatagaagatcggtttcccggttttcatatgctcttcgccgagctgatcgaggatcaccgtcccggaggagtggcagttgccgagatagcccggcaggttggcgcgtttcaccagcttatccagcagctcctgcgggaagctgttttcctggtcgctgaagtagccccagtcaaacagcaccggcacgccggcgatttcccagtggccggacggggtatctttaccggaagaaagttcatgcgcccaggcataggcgccaatcacttcggcattgccatccatacccgcggcaattttaccggtggagccttcatgcgctttcaccagacccagacgggtcaggttcggtaaattcagcgggcctttgcggccgtggtcagcctcgcctttggcgcaggcttctgcaatgtggcccagcgtatcggcgccgacgtcgccaaagcggtctgcgtcttccgttgcgccaatcccaaaggagtccagcaccatgataaatgcacgtttcatcttgttctccatacatcttgcgctgcaaaaaagcgatcagatcagtatatcgctattcagtgatacggcgatagactgtcggcgtaatttccggggctttatcgtccagtttaatggccgctttgaccgctttcgcggcctcctgccagctgttctcgtctttggcatggatcaccgccagcggacgctgtccgtcgacgcggtcacccagacgcgccatctcggtaaagccaacgctatagtcaatggtgtccgatgcctgacggcggccgccgcccatagaaaccactgccatgcccagcgcgcgagtatccatcgcgctgataaaaccttcggtatcagcatagactgctttgctcagcatcgccgtcggcagataattagcataattctcgacaaagtcgctcggccctttctgcgccgcgaccatgcggccaaacacttccgccgctttaccgttatccagcaccgcctgcagcttcgcgcgcgcctcggcatcgtccgccgccagcttgccggagatcagcatttccacacacagcgccattgtcacgtcgaacaggcgcgggttgcggtattcgccggtcaggaactgcaccgcttcgcgaacttcaacggcgttgccggcgctggaggccagtacctgattcatatcggtcagcagcgcggtggtgcgcacgccggcgccgttggcgacacccacgatcgcttcggccagcgcggcagagagttcataagtcggcataaacgcgccgctgccgactttgacgtccatcaccagcgcatccagcccttccgccagcttcttcgccagaatcgaggcggtaatcagcgggatggagtccaccgtcgcggtaatatcgcgggtggcatagaaacgtttgtcggccggggcaagggagctggtctgcccgataattgccacgccaacatcttttataatctcgcggaagcggttgtcgtccgggaagatatcgaagcccgggatcgcttccagtttgtccagcgtaccgccggtatggccgaggccgcggccggagatcatcggtacgtaaccaccgcaggcggccaccatcggccccagcatcagcgaagtgacatccccgacgccgccggtagagtgtttatcgacgatcggaccgttaaggttgaggcttttccagtccagaacggtaccggaatcccgcatcgccatggtcagcgaaacgcgctccggcatagacatatcgtggaagaagatggtcatcgccagcgcggcgatctgcccttcagagatagtattgtcgcggatgccgttgatgaaaaagcggatctcttcatcgcttaatgcctgaccatcacgttttttacgaataatttcttgtgcgagaaacacggtaacctcccaaagagaataaattgccggatgacggcgcgagcgccttatccggcctacaggcatcaattcgtaggccggataagcgcagcgccatccggcaaatcaagggattagtagctgctggcgctcttgccgtcgccgtgacccagggctttcaacaggctagccagcaggctggatgcgccaaaacgatagtgacgagaatcggcccagtcggcgccgaacagttcatcagcgatcgccaggaactgctgcgcgtcttccgcgctgcgcacgccgcccgccggtttgaagccaacggttttctcaacgcccatatcgcggatcacttccatcatgatgcgcgcgctttccggcgtggcattcaccggcactttaccggtcgaggttttgatgaaatcggccccggctttgatagagatttcagacgctttacggatcagcgcttcttctttcagctcaccggtttcgatgatcactttcagcagcacgttagccgccgcacaggcatccttacaggctttcaccagctcgaaaccgacctgctcgttgccggcgatcagcgcgcggtacgggaagaccacgtccacttcatctgctccataagcgatcgccgcgcgggtttccgccagcgcaatgtcgatatcgtcattcccgtgcgggaagttggtgaccgtggcgatgcgaatatccggcgtcccctgctcattcagcgtcttacgggcgatcgggatgaagcgcgggtagatgcagaccgccgcggtgttacccaccggcgttttcgcctgatgacacagggcaatgactttctcattggtgtcgtcgtcattcagggtggtcaggtccatcagttttaacgcgcgcaggctgcttgcttttaaatcagtcatttcatactccgccggcgtcatgccggatcaatagtttgttcaccttgcgagtctgttactattgtaacattcgctcgtcgttacacttcgacattcatcacagttaatgaaaactacttactaatttgcattactgtaacgtgattaagatcacaaattaccactcaataccgcagcaattatcgttagtcccctcttaagcataatcgatactataccgccgatgagaatgtgataattctaacacacaataacagatgtactcgatagcgtggcgcacattttgcccaatttacgggaaataaaaacgctacaaattgaaatataaatcttttttcaaaaaagagagtggtgatggaattatcacatttacagcaacaccagcggcacggtggccgctggttcaggagacaggcttacagggcgagaaaaaccccggcgatggtggcgctcatcaggttggacagcgtccccgccgctaccgcacgtagcccaagctgagcgatatcctgccgccggttgggcgccattcccccgagtccgccaatcagaatggcgatcgatgacaggttggcaaagccgcacagcgcgaaagagataatggctttggtgtgatctgaaatgacctgcagcccggccgccgccacttcggcatccgcctttaaatattcgccaaagttcatgtaggccacgaactcgttaatgatcagcttctggccgataaacgaccccgccaccgtcgcttcgtgccacggcacgccaatcacccacgccagcggtgagaagatccagccgaggatcatctgcagcgacagctcaggatggttaaaccagccgccgacgccggagagtatgccgttcagcagggcgatcagcgcaataaacgccagcagcatcgcgccgacgttgagcgccagttgcataccagacgcggcgccggaggcggcagcatccagcacgttggccggtttatccgcgtcagcgctttggctgtcatgagccgggttatcgtccggtttgtccgtttccggtacgataattttggcaaacagcagacctcccggcgccgccataaacgacgcggcaataaggtactccagcggaacgcccatctgcgcatagcccgccagtaccgagcccgccaccgaggccaggccgccgcacatgaccgcaaacagctccgagcgagtcatggtggcgatataaggacgcaccaccagcggcgcttcggtctggccaacaaagatgttcgccgtggccgacagcgattcggtacgtgaggtcttcagcactgcccgcagcgcgccgccgagaatgcgaatgaccagctgcataatgcccaggtagtaaagcacggcaatcagcgacgagaagaagacgatcaccggcagcacgcgcagggcaaagacgaagccgccgccgccaaacacctcgaacattttatcggagaccagcccgccgaagatgaaactaatcccttcattgccgtaggcaataacgctggcgacgccattcgacatcgctaatagcgccgcgcgcccggccggtacatacaatattaacgcgccgatacccacctggattatccaggcgccgagcacggtgcgcaggttaatggcttttcggttattggagagcagcacagcaatggccaatagcgccaccatgccgataagtcccatgaggatttgcatacagattccctgtgtttttgatagtccagtactaaccgcgtgattatatcggcctgaaactatcctgcccgtctggcttcacacattttaagcaaatcaatgatatggatggacaattatgagaaatcgatcaccatacagagaccgggggaagggaaaacaaggcgagcgtattgtgcatgatcccttcttctatggctgccggcgactccgaacgcagttcacacagcgcctcaaatacccgtgcagcttgttccggtcgattgggctgtccctgaaagccatttagcggcatatccggcgcatcggtctccagcagcagagcggaaagcggcagacgcgccatcacttcacgggttttactggcgcggggataggtaatggtgccgccaacgccgatcttatagccaagctgaacgaagcgctcggcctgctgcaggctgccggcaaagccatggatgactccggtacgcggcagggcatgttttttcagcagcatcgccagcttatcgtgggtgcgtctggagtggaggatcaccggcagatcgtaacgcttcgccagcctcagctgcgcttccagcagcgcctgctgacgatcaaactgcggatcgtcgcgataaagatcgaggccaatctctcccaccgccaccagtttaggcggccgctgcgccatcaaggcttccagctgcgccagtccctcatcagtatgctcttcgatgacgatcggatgcatacccagcgcggcgtacagcgcttcgtgctgagctgccagcgccagcacgcggctaaaacgctcagcagagatggctggaacgataattcgcccgacgccggcctgcgccgcacgcgccaggctggcgacctcatctgccgcaaaggggggaaaatcaaagtgacagtgggtatcgataaaacggtgcgtcacgccagatcctcatgatcaaaactggggtcattcgcctggggcgcaggaatgatggtcgcctggggcgcttcattggccaccggcaccggcggcaccaccaccggcgcgggccgggcaatacgcggcgcgtggcgcagcagcggcggctggtcggccagtagtttacccaccgttgccaggaaataacggccgcactggcgcccggttttgtagtcctccagcagcgccggtagtcggctgccaagcgccatgctgcgcagcggccgctgcggatagatttcgaagatccgcaacttacccggcggtttctcgatgaactgctggatggcgcggtaggtggtttcgtgatgatgcaccaaattgaccagcggttgcagactactctctcccagccagcgctccatccgcttgaaccactgcggggtataaaacatctgcgaagggacggtacggatcaccacgatggtctgggcgccgcggcgggccgcctcctgcaccgggatagcatcgctgacgccgccgtccaggtagctaacgccgtcgagcaacacgccgctgcgataaaagccggggatggcgctggaggcgcggatcagatccagccacgtttgcggcgtcggcgaaaaatagctggcggagtaatcgtcaccgcggcaagcgcatagccacagctctttccccaacgcgaactgcgcttcggcatagttcatggcaagcggcatttgctgcgaagtggcctcaaccagccagtcgagatcgataaggttgccgccgcgcacaaagcgcatcggatcgaaaaactggcgtgaagtggtgtagcgggtgataactttgcgggcatagccttgctgattacacatgtaggcggagaggttttgcgcgccggctgaagtacccagcatcaggtcaaaggggttaaatccggcgcgcataaattcgtccagcaccccggcagtaaaaatccctcgctgtcctccgccttcgcataccagcgccagcttgcctggtcggaagggtttaaccgccagcggggcgatattgcccagcgtgacgggaatgcgttgccccaccctgctttcctgttcgattgatcttctcctgacaaggtaacgcaatttgcccgccgcttaaaccgcgaaagccagtcctcaggactggctttgtgtaagatgacgtgtcagtaaaaatgcttaggcttcagtatcgcccgcatcgcgggccgcctaaggacgtctgcgtcctgtaaacaggctcaccaggaacaggataatcccgacgacaaagacgattttcgcagcgccagcggccgtacccgccagaccaccaaagcccagagccgcagcaattaatgcaatgaccagaaaaataattccccatcgaaacatacttttctccttaccataatggacggtgaacagcggtttgcgcaccctttctgtatagctcatcgctcagtggatgctgctattcgttcggcaaccttggccagacaacacttttgttaataactcggtttacttaacgctaagatcgttgcgcacgcttttcacaccggagaccgctttcgcaatctctgcggcacgctccgcctgcgccgcggaagccaccgtaccggtcagatgtaccgcgccggcgttggtttcgactttcacattgcgcgaagggacaatgtcatccgccagcagcttggctttcacttcgctggtaatggcggtatccccggcatagcctttcagcgtcgccgtctcgctcgatgatttatgatggaccgtcagcttgtcgttaacgtgtgagacgcctttgacctctttcgctacgctcagtgcctgacttttctgttcagcactggtgacgtcgccgctgagggtgaccactttattctccgttttcaccgaaatatcgccggagttaatatctttatgatcgatcagcgccgcttttacccgtgcggtaatggtactgtcgtccataaaatcgccgactttgttaatcgaattatctaccgcctctcccgcattgctggcagccgacttcgcactgtctaccgttgttttttccgtctctgccgaggcgttcaacgcggctaagcctaagaagagcgccagcaacatattggcattctttagtctggtcatcgttatgtcctcgttttttcaccagcgctggcgtcttatcgcagtgaattacgccagcatttttaaaaacacgaattaaatatagtagacagacgaaggggttgcggaggatatggataaaaaacagacgaattagcggtgttttaagaactttccagaaggaagggaacgggggcgtaaccagaaaaaagcgcggcctgagccgcgcttcgtcagggattagtgctcgcgcgttttgcggaacaccacgtcagggtaacgctcctgcgtcaggttcaggttgaccattgtcggggcgatgtaggtcaggttatcgccgccatccagcgccagctgaacttcatttttccgcttgaactcttcgaacttcttcacgtcagtagattcaacccagcgcgcggtggccacgttgaccgattcgtaaatcgcttccacgttgtattcgcttttcagacgcgctaccaccacgtcaaactgcagcacgccgacggcgccaacgatcagatcgttattagcgatcgggcggaagacctggaccgcgccctcttcagagagctgaaccagccctttcagcagctgtttctgcttcagcggatccttcaggcgaatacgacggaacagttccggcgcgaagttcggaataccggtgaacttcatcatctcgccctgggtaaaggtatcgccaatctgaatggtgccgtggttatgcaggccgatgatatcgcctgggtacgcttcttcaacgtgcgagcgatcgcccgccataaaggtcagcgcgtcggaaatcactacgtccttgccgatacgcacctgacgcagcttcatgcctttttcatatttgccggacaccacccgcatgaaagccacgcggtcgcggtgtttcggatccatgttggcctgaattttaaacacgaagccggtgaatttctcttccgtggcggtgacttcacgcgtgtcggtgttgcgcggcatcggcgcccgggcccactccaccaggccatccagcatatggtcaacgccgaagttacctaacgcggttccgaagaagaccggggtgatttccccggccaggaacagatctttgtcgaactcattcgacgccccctgcaccagctccagctcgtcacgcagctgctgcgccaggtcttcccccaccgccgcgtcgagatccgggttgttgagccccttcacgatacgcacttcctggatggtgtggcctttaccggtctgatacaggtaggtttcgtctttgtagagatgataaacgcctttgaacagcttgccgcagccgataggccaggtaatcggcgcgcagccgattttcagctcgttctcgacttcatccagcagctccatcggatcgcggatatcacggtcgagtttgttcataaaggtgaggatcggcgtatcgcgcagacgggtgacttccatcagcttacgggtccgatcttcgacgccttttgccgcgtcaatcaccatcaggcagcagtccaccgccgtcagggtacggtaggtatcttcggagaagtcttcgtgccccggggtatccagcaggttcaccaggcagtcatgatacgggaactgcattaccgaggtggtgatcgagataccacgctgcttttccatctccatccagtcggatttcgcgtgctggctggaaccacgaccttttactgtaccggcggtctgaatcgcctgtccgaacagcagcaccttttcggtgatggtggtcttaccggcatccgggtgagaaataatggcaaaagtgcggcgtttggccacctcttgcagataaggagacaacgtcataattaatcttctaagtaaacgcggccatgggccacgcatgtggaatacgaaaaattgcggctattttacccatcaacgggggggaggcaatcagtgtttacacaggagctgctccagttcgcttaacgaggtcaccgtccagtccggctcgagatccgccggcagctcgcgctgatgcgcattgagccagcaggtcgccagtccggcgttcacgccgccgcgaatatccgactcggcggtatcaccgaccatcagcacccgcgagcgcggtgggttacccgcctgcgccagcgcataatcgaaaatacgcgcgtccggcttggcgacacccacctgttcagaaataatcagcaaatcaaagtgatcgcgtaaacctgtccgctccagacgagtctgctgcagcgaggtaaagccgttggtgatgatgcccattctgaccttgccctgcagcgcgttgagcagcgagaccgcgcccggcaacggggcacagatttccgccatcgcattcataaacgcgtcgttgagttccccgggcggcacattcaaacgttccgcccagctgtcaaaacgctggtgctgcagctgcagcgaggtgatggcgccgttttggtaatccacccatagcggcttgttcacggcctgatagtcctgaaaatcttcggcggtaaaggtcacgctgtagtcgagaaacatccgctgcaagccactgaaagaatcaaacgtaaacagcgtttcatcggcatcaaagaaaatccagtcccatttcatcgtatcaccttgtgttacatactgattggcagagccataataatggcgtcttcgcgtccgtcggccgtaggatagtagttgcggcggatggttgcctcattgaaacctacgctctcatacagcgcgatggcggcaacgttggatgctcgcacctccagccacagcgtgacgacgccgagtttttcgacttcatcaatgacatgctccagcagcgctcgccccaggccgcggcgctggtacgcgggatcgacggcgatattgaacagcgtcgcctcatccagtaccacttgcgtaatggcgaaagctgccatttcgccatctaccgacagctgatagttgcaatagcgctccccctggttactggccagagtctgttcgctccacgggaaagcgtgggcgcgtttttcgatgtgccaggctttggttaaatcagccgtgctgagggtagaaatcgtgttcatgtgcgcagatttgttgccagagcgccctgcgagccggcgcgctggtctggagttcatcaaaagcgggggtggacatctgggcgcccgccagcggcagcgacgcctctgtgcccaaccgccagctgttgcagcggctgtcctgcggcagcatcgccacccgctccggagtcagctgcaggacctgatctggcgtcacggccagcgcgcgtaatatgtcgccaatcagcggctctgtcagcgacggcggggtttccgccaccatcaccagacgaatatgttcaggaagcgagatagcgatttcgccctgcaacgcccccggtcggcgcagcgaccactgggtaatgcccagctgctgtaattgccagtctcgtcgggatgtcatagcgaaacactcctgttaaacaagcgcgcaatatagcaaatccgtcgtatctgcgccaacaaactactataatcggcgccagtcttaatgaaggagtgtttcatgtccgcttttaccccggcaagtgaagtcttgctgcgccacagtgatgatttcgagtccgcccgcgttctgtttgccggtgacctgcaggatgacctgcctgcgcgtctggataccgcggccagccgcgcccacacccaacagttccaccactggcaggtcctcaaccgccagatgggtgacaccgtccgttttagcttagtggctgaggccgctgacgtcgccgaatgcgacaccctgatctactactggccaaagaacaaaccagaggcgcagttccagctgatgaacctgctctctctgctgccggtgggaagcgacattttcgtcgtcggtgaaaaccgcagcggcgtccgcagcgcggagcagatgctggctgaatacgcgccattaaacaaagtggatagcgcccgccgctgtggcctctatcatggccgtctggaaaagcagccgaccttcgacgccgacgcattctggggcgaatacacactggataatctgacgataaaaaccctgccgggcgtcttcagccgcgacggtctggacgtcggcagccagctgctgctctccaccctcgagccgcataccaaagggaaagtgctcgacgtcggctgcggcgcgggcgtgctggccgccgcgctggccagccattcgccgaaagtgcgcctcaccctgtgcgacgtcagcgccccggcggttgaagccagccgcgcgacgcttgccgccaacggcctggctggcgatgtgtttgccagcaacgtcttctccgaggtcaatggtcgcttcgacatgatcatctccaacccgccattccatgacggcctgcagaccagtctcgaagccgcccaggcgctgatccgcggcgcggttcgccatctgaacagcggcggcgagctgcgcattgtcgccaacgccttcctgccgtatccgcaggtgctggatgagacgttcggcttccatgaggtgatcgctcagaccgggcgctttaaggtctatcgcaccattatgacccgtcaggcgaaaaaataatcgtcttttcacgccggcggcccgctcctggtaccgctggcgcttcccgcgggcaaatccgcccatttttgcagcaatcgatacaacctgcataattaactattgacgtgtcgccgaaaaccactagaatgcgcctccgtggtaacgatactttcagagtatcgatggtatgcgaaggtggcggaattggtagacgcgctagcttcaggtgttagtgtccttacggacgtgggggttcaagtcccccccctcgcaccataatccacgaagatattgctcgcactgggcgaaggtggcggaattggtagacgcgctagcttcaggtgttagtgtccttacggacgtgggggttcaagtcccccccctcgcaccaacgaggcaatatcccaaagaaagaatactgtgcgaaggtggcggaattggtagacgcgctagcttcaggtgttagtgtccttacggacgtgggggttcaagtcccccccctcgcaccaatattcttccctctcccggcattatcctctcagtttaatatccacaatcatcagcattattccgccaatcaatgcgacgcacgatggcagcaggataaaatggcgcaattgacgatgccagatcatcgccgcggacatcagcatgcccaccgcgaccagtacccgccatacgtcagccgacactccggcatacccgagagcgacaattagcgcgccgggaatcatcactccccagccgcttcctaatgctcgctgcagcatggtttcacctctcacaacgataatgataaccaatatcatatgataatctttatcatttgtcatttgcgacgtgctctgcccctttttctttacgttcgcggtaatgacatacattcatgaaggtgataaattaagcggattatcgatatatattaaatattttgcttattttgcaaataacctttttttgcacattgttatcagactcttcatttttggctttcatcattttgaaatttaacgactaataatgattcttccgatatgactgcacaaacctggcgagcacactacgcacaaaaatatcaatattccttacggctttttttactgcttaatttcatttcttcctcgctgtcgctggtcacccccctatttacggtagttcgttttacgctgccctgcgccctgatcgtcgtctgcagcgggctgctgctgctctggcactggaaatggccgcaatcgaaaataaatattcccactatctcgttgttatttggcatgctatgggcatggcacgtagtgacaaaagcgatgctattgacaccgccgcattttaactatctggtgatcgccctattaagcattctgtttatcggcaccatcgctttttccaataatatcactgcctttaccctccactctttaccaactttccttgcctgcctgataatggcggagggggaacaatggttgcgtatgacttactgctttatgctgcctatagccggtattaccctgcaaaatattatccagaagcgcagcgatgcctttacgcagggtttaatggataaactgatgcatgaacgcaatacgctcaacgatctcagtatgctcgatcccctgaccggtttgtataatcgccgcggactgcagaaccgcctcgataccctgctggcgctggacggcgacaaccactacgtgctgctcctcgatatcgatcacttcaaggcctataacgatcactatggtcatatgatgggtgaccaggcgcttattcgcgtctctgctgccattcgcaacgctgtacgctcacgcgatattgtcgcccgctttggtggagaggagtttatggtgctgctgaccaatagcagcgaagaaacggcctggaagacagccgagcgtatacgtcagcgggtctatgacctgaagatcccgcatatgtttaatgaaagcgtcgccaccaacgtcaccatcagtattggcctgacgccgctcattaatgacaacattgaacaagcgctggcgcgcgccgacggcgcactctatgaggccaaaaataaaggccgcaacattattcttgccagttgacctgcgcgcgctgcgacatcgcggcgccgataaaagccttgccatgccgcctgcaagcaactaatatcagtaatcattatcatttagatttgtatctggaaatcgaatggcctggcgttcccttcctctcagcgatgaacttatctggcgggctcctttgccgacggctgagcatgccctggcggagagtattcgggaaaaaatcgccaccctgcgcccacacctgcttgatttcctgcgacttgacgaacccgccccacggcacgcgttaacgcttgccgaatggtcgcaacccatcgccttgcgctccctgctggccacctggtccgatcatatctatcgtcatcagccgacgctgcctcgggaacagaagcctctgctctcgctctgggcacaatggtatatcggcctgctggtgccgccgctgatgctggcgctgctcaatgaaccgcaaggcctcagcctggcgccagaacatttccatgtcgagtttcatgaaagcggccgggcggcctgcttctggattgatgtgcatagcgatgccgacatcgagaggctttcaccgcaggcgcgaatggatgccctggtaacgcgcaccctgcagccggttgttgaggcgctggcagcgacgggcgaaatcaatagcaaacttatctggagcaataccggctatctgattaactggtatcttggggaaatgcgcgcgctgctgggtgatgagcggcttgccgcgctacgtcagcactgtttttttgaaaaacaactcgccgatggccaggataacccgctgtggcgaacggtgatgctgcgtgaagggcagttagtccgacgcacctgctgtcagcgctatcgcctgccggatgtccaacagtgcggcgactgtacgcttaaataattaccacttacctgaaaagtaacgggcggcctttaccgcccgttgctatttatgcggtctgttgactctcctgctccgcccgctcggcctcttccgcttcctgagcaagcagttgtttctcatataccttaaagaatgggaagtagatgattgccgacacgcaggccagaacaatgaccagaatcgccgcccggaaatcccagcccaacgcccaggcgccgccaattggcgctggcgccgtccatggtacgacggagatgacgcggccaatcagatccagcttcattgccgcccaggccagcaccgcgttcaccatcggcgccagcaggaacggaataaagaacactgggttcatgacgataggcgtcccgaagatcaccggctcgttgatattgaacaggcttggcaccacgctcaaacgaccaatggagcgcaaatgcgctgaacggctgcgcagataacagaacaccagtcccatggtcgccccggaacctccgaccacgataaagaaggtccagaacgcctccataaagatatgcggcagaggcgcgccctgggccagcgcctgctggttcataccgaggttagtcagccagaacatctgcagcatcccggacacgatcgccgcaccgtggatcccggcaaaccacagcaggtggccgatcagcaccgccaacagaattgccggcagagagtcggctgccgaaaccagcggcttgaaaatggccataatggcctgcgggatcagcatgtcaaaatggtgctggataaacaggctcagcggatagagcgtcagcacgaccaccagcaccgggatcaacagatcaaacgagtttttgatcatcggcggaacctggtccggcaagcggatcccaatgttgtgcgctttcaagaaacgcatcatctccacgcagtagatcgccaccaggatggcggtaaagatcccggtccccccgaggctatccaccggcagcgtgccattggtcttcggcgcggcaatcagcaaaaaggccatgatcgacagcattgcgcacataaagggatcgagctgattggatttctcgtaatgcttaccgaggttataggagattgccgcgcagatgtagatcgacatgatccccatcgtcatatcaaagggggtcagaatacgcccctcaaactctttcgccagatccagccaggcgcgggcaaaaccccaggtggtatccggtgagaacggtggataagcaaacactaacaggaacgatccgacgatcataaacggcatcgctgagataaatccgtcacggatagccatgacgtggcgctgcgacgagatccgccctgctatggggcttatgtaattttctacaaagcgaaatatcaaattaaacgcagcatggttagcagacatagtagccctcctgacaggctattgatactggcccaacaacgattaccctgccgttacgatgaccgctttttgacgcagcaggccgctggcggatgtgcaaccggctatactgctcatgaggcaacgattcatacacggctcttttgttataaataaaaggagaagtgactgttccagtattcatctcaatgcagataaccgcaaccggttacagtaaccggttacggcgattgtgaaggagatcgacaaaatagaaagaatctggattgtccgcgctgatatttacactccgccaggcttgtgacagatttaaccaggcttaaatcaggagaatccaatgagtctgcagtctgtacggcagttttttgccgaacacgcccccgatatcgaaattattgagttaaatcagagtaccgccaccgtcgcacttgccgctgccgcacacaacgttgagccggggcaaattgccaaaacgctgtcgctcaagatcaaagataagattgtactgatcgtcgccaggggcgatgcgcggctggataataaaaagctgaaagagacctttggcgcgaaagcacgcatgctaagcagcgatgaagtggttacctggaccggtcatccggtcggcggcgtttgcccgtttggcctggaaaatccgctggcagtctactgcgacgtctctctcagacattatcaggaagtactacccgcagcgggagccatccatagcgcggttcgcattgaaccagaacgcatggcgcagctcaccgatgcaacatgggtagatgtgtgtttatagccgcattacgctacctgtttaacggcgctggtcgtactattgagcggtaaatgcaacaggatatccgccgcgtttaataaaccaatgtctgagcgaactccgagcttggtcatggcgttaaacttatgcgcgcggatcgttttaatattccggttgagctgtatcgcaatatcagaaagcgaatatccccacgacatataccgaaggatggcgtgctccgtcgggcttagcggatcgttgcacgcctctctgtcgcaaaattgttcgctgccgctgagatgatgattgtccagtagctgcagcaaacgctcctgtagcccgcgtcgcggcgcggatttattcagtatgccgtgcaaacaggccggcataagatggccgatcaggtgcatttcactttcattattagccagaataatcgtttggacttccggccggcaccgcgccatttcatgaacaaagagcagactctcggctcgtgaagaacgacttcccgaaagagaaaaaataatggttgaccagggaaacggtatttccgccgccctgagcatactgacatttttaaacagatgaatatgataacggcgattatcttcacgactaaagatatagcgccatgccatttccgtcatcacgcatttttctacgatggcgacatggcgggttgtactatttttttccattccatttgctccccgtaagctgaattgatattcagctcttgcattccctgcgcgctgttgatccaggcatacatttcagcgttgctgcgtagcgataagcgacgcattgcgctgtttttctgcgcgctgatcgtcttattactctttttcaacagcgcggcgatctggtttattccccaccccttcgccagaaggcgcagaactttacgctctgaaagagtgagcatcgccgcagagtggtagcttgcgaaatcgctgtcctcatccccggcaaacagcgtacggctaatctgttcagccgcacggctaccggcgcaaatcacctcaatcagccggttaaccggctcgctctcggagatcaacgagctttcaggacgaattaatagctcaacggccaacggatagaggctgtcgctgaccataaaaacccagtgaatatcacggtactgggtcatgagggagtaataacgctcgcagacggctcgggggtgcgcaatctcgccggagatatccgcgacaaccagcaccgcccgccgcagttgtaaaagggtgagctcatcatgagaacgacaaaaactcagttcgtaatcagggaggttctcattgaagatcacctttaaccctgattgcatgacgggaattttactaataacgacgccaaacttaccttgtcctggtaacataacacctccgcttcctgtcgaagttccttcgcttgcctgcaaacgatcggcgagcgactttatcgccatatcatttcctggatgaatattaaaatcatattcatggcctgcgcacacgatatacgtaacgaccgaaccgtggtcataccgtgtaaaatattattgccgtgtatacttgcgattaatattaacacagacattcctgcgctaataaattagaaaagataaaaacattatttagcaaaaataatttcagtactgaacattatgaagcattatctttaattgtttctctaaatgctttgggtgacataccgctatagcgacggaaaaaacgcgaaaaataggctgcatcgctaaaccccaaataatcagagagttgtgtaatcgtcatgcgggtgtactgcagattgcgtcgcgcttcaagcatcaaccgctgatgcaatactccaagagcgctacagccataaaactcacgacataaataatttaagtgcgtaaccgacagtccaatcagcttcgcatactccgccaacgggagatgctgtcggtagtggctctcgataaggcgggcgaagtgacgcatcatgctgcgcttccgctccgctttatcttccgcgggggacgcgggatggcactgtcggttcagccagaccaacagcgtccccagcagcgaatagagcatcatttctcgcgcatcgtgctcttcgcagtactcctcgcgaagcgctgaaaacagcgtatgcatgcgcccgcgagaacggcccaccggcacacactgcggcacgctaagcacatccagagggcgaccgaactgattttcaaaccggctcagcagcggcagcgccagagagagcacaaacccttgcgtcccgggtgaaaaattaaacccgtgaatacagagggcgggaaccacctggatgcaggactccgtcatcaccgcggtggcgccttcaatttcgatctccgcccgcccctgatgcagatagagaagctggaccatttccgcatgctgatggacgcgaatatgccactgatacaggctgctgcgctgtaaaatcgactcacagtgcagcaggtccggcgtcggccagccgcactcttcgccatacagcttaaatacgggcacggtttgaacgaacggcatgatgactcctcttaattcaggcgacacgctccatgggcaagcccacgtagttttccgcgatggtggtcagcccggcgcgcgagcccagatagtagcggcggtcggcggcctgcattttagcgtcgaacgcgttctgatccggaaaatcatgcagcaggcgggtcataaaccagctaaagcgttcccctttccagacccgatccagcgccagttgcgagtaggccgccagcagatcgctgcggccacgatggtagtattcgcgcagaatccgccacagatagttcacgtccgatgccgccagatttaatcctttcgccccggttggcggaacgatatgcgccgcatcccctaccaggaacaaccgcccatattgcattggctccacgacgaagctacgcaggggggcaatgctcttctcaagtgagtgaccagtcactaacctggatgccagctcctccggcaagcggcttttcagctcctgccagaagcgctcgtccgaccatgcttcaaccttatcgctcagcggaacctgcagataatagcggctgcgggtcagtgagcgttgactgcacaatacaaacccccgctgatggtgcgcataaataagctccggattgaccggcggcgtatccgccagcaggcctagccagccaaacggccacacgctctcgtaggtctgcaaaatgccagctggaatactttgccgcgatacgccgtggaaaccgtcgcaaccggcaataaaatcgcactccagacggcaggtttccccttcgctgaggtaggtgatcgtcggccggtcgcttttcgcgtcatggatagccacctcgctcacgccatagacgatcggcgcgccgctggcggcccgggcagccatcagatcgcgggtgacttcggtctggccataaaccattacgctcttaccgtcggttagctcgctcagtgcgacgggcacccgctggccgtcaaatagaaactccaccccatgatgcaccaggccttcggcatccatccgctgcgccacgcccgcttcgcgcagcagatcaacggtaccgctttccagaattcccgcgcggatgcgccccagcacatactgcggcgtttgacgctcaaggatcacggtatggatcccggcgttgtgcagcaactgccccagcagcagcccggaggggcccgcgccaataatcgcgacctgtgtcttcatagggatgtctcactcttgcagggttaattatttgtataatttttgtttaataaaagtgcttttctgcatttttgataagtcagtggggaaaaagaagggatgaatggcgacaaaaattgcacttttcaccaaactggcaaaagtgtgggatgcttcaaattctgccgccccgcagaccgggaatttttgcacattatttgatcccacccccctcagccgccactgcgcttcaggttaaagtatcggcagataccaggcgtcgtggacaatagaggaagtatgcaggttgatcggacacagcagcgggcaatcacacgtttatgcatccagtgtggtctttttctgttacagcacggcgccgagagtgcgctggtggaggaactgtcaacacgtctcgggctggcgttggggatggacagcgttgaaagcgccatctcttcgaatgccatcgtcctgaccaccattaaaaatggcgaatgtcttacctctacgcgcaaaaatgtcgatcgcggcattaatatgcatgtggtgacggaagtgcagcacattgtgatcctcgccgagcataagctgctggactatcgcgacgtcgagaagcgttttgcgcagatcgttcccctgcgctatccgcgctggctgctggtgctgatggtgggtctttcctgcgcctgtttctgcaaactgaataacggcggttgggatggggcgctggtcagcttctgcgccagcacggtagccatgtacattcgccaggtgctgacccatcgctccatgcatccgcagatcaacttctgcatcaccgcctttgtcgccaccaccatctccgggctgctgctgcgcctcccggcgtttgccagcacgccgaccattgccatggccgccagcgtcctgctgctggtcccgggttttccattaatcaatgccgtcgccgatatgtttaaagggcatatcaataccggactcgcccgctgggcgatcgccagcctgctaaccctcgccacctgcattggcgtggtgatggccatgaccgtatgggggctgcgcggatgggcataatctcatttatttttgcgctggcggaagacatgctgctggcggcgatccccgccgtcgggtttgcgatggtctttaatgtccctcagcgcgctctgcgctggtgcgcgctgctgggggcgattggccatggctcgcgtatgatcatgatgagcgccggttttaacattgaatgggccacctttctcgccgctctgctggtgggcagcattggcattcaatggtcgcgctggtatctggcgcatccgaagatttttaccgtcgccgccgtgatcccgatgtttcctggcatctcagcctacacggcgatgatttccgcggtaaaaatcagtcattttggttattcagaagagatgatgattttgctgctgagcaattttttaaaggcctcttcgattgtgggcgccctttcgattggcctgtcgatacccggcctgtggctgtatcgtaagcgtcctcgcgtctaaccccgacgtcgcggttaatccgcgacgctccttccgcgatagcctctgtgctactatgtgcagatcaccccactctttgcagttcagagttgagatagagttatgtcttcgcgaattttaacctcccattttagcggcctggaagagttcctccagcagcacgcggcgctgctggcaaaatcgactgacggcaccgttgccgtttttgccaataacgcgccggcattctatgcgctgacgccagcgcggctggcgcaactgctggagctggaagccaggctggcgcgccccggcagcgacatcgcgcttgacccgcagtttttcgaggagcccgccgcggcgccggttgcggtgccgatgggcaaatttgctatgtacgccgggtggcggcctgacgccgattttcagcgcctggccgcgctgtggggcattgccctgagccagccggttacccccgaagagctggccgctttcgtcgcttactggcaggcggaaggtaaagtctttcaccacgtgcagtggcagcagaagctggcgcgtagcgtgcaaatcagccgcgccagcaacggcggacagccgaagcgcgatgtgaacagcgttagcgaacccgacagccatattccgcgaggtttccgaggatgagcatgaaaaacgttggcgacctgatgaaacgcctgcagaaaatgatgccggcacatattgaaccggcgtttaaaaccggcgaagagctgctggcctggcaaaaagagcaaggccggctgcgttccgaagcgctggagcgagagaatcgcgcgatgaaaatgcagcgcaccttcaaccgctcggggatccgcccgctgcatcagaactgctcctttgataactatcgcgtcgagtgcgaggggcagatgaatgcgctcgcccgggcgcgccagtacgtggaagagttcgatggcaatatcgccagctttatcttctccggtaaaccgggcactggcaaaaaccacctggcggcagccatttgcaacgagctgctgctgcgcgggaagtcggtcttaatcatcaccgtggccgatattatgtcggcgatgaaagataccttcggcaaccgggaaacgagcgaagaacagttgcttaacgacctcagcatggtcgacctgctggtgatcgatgaaattggtatgcagacagagtctcgctatgaaaaggtcattatcaatcagatagttgaccggcgctcatcctccaaacgacctaccgggatgctcaccaacagcaatatggaagagatgaacaaactgctcggcgagcgggtgatggaccgtatgcggctcggcaacagcctgtgggttatcttcaattgggaaagttaccggcaccgcgttacaggcaaggagtattaagagatttccgggcgacgacggcgttatactaaagcgattattcagtcacgcttatgagtccgtctatgaaatcgtttaaaaatagcgttgttgccgcgcttgccgttagcgcgtttaccctctctggcgcccacgccgcctcctggcaggattcccttaacagcgctgccagccagctcagcggcagtaacgcccaggccagcggcggcatgtccgtctcctcgctaaccagcctgcttaacggcagcagccaatccctgaccgccagcagcatgaataatgcggccgggatcctgtcatattgcgcgaaacagaagctggcctccgtgaccagcgccgataacgtcaaaaatcaggtgctggataaactggggcttagcacgccggaaaaacaaaaacaggacaccagctatctggatggcctgcaggggctgctcaacagcaaaaacggccagcagttggacctgaatacgctcggcaatagctcgctggcgaaacaggtaaaaaccaaagcctgcgatctggtcttaaaacagggtgttaatttcctctcctgatcctgactgacaaggccgcatttgttgccttcgcggcggcgccgcggcctgaaacgcttttttttgcagttttcctgttccgttttcccattccacccgatgcgatgccgatcaaaaaaggcaacttctaaaccaattctgaataactgcacactttcatgacgctagaattgcagcaagatggcgctgcaattacagtggggcttgaaaagtaatctgttctgccagccgataactggcattaatgaggatgagctgtgtcagagttgttatccatcgccttatttttagcttcggtggtgctgtatgcctggaaagcgggtcgtaacacctggtggtttgccgccacgctcacggtgttaggcctgttcgtggtgctgaatatcaccctctacgccagtgactacttcaccggcgacggcatcaacgacgcggtactctacactctgaccaacagcctgaccggcgccgggatcggcaaatatatactgccgggggtcggcgtggccgtcgcactggtcgccgtctttggcgccctcggctgggtgctgcgccgccgtcggcatcatcctcatcacgtcggttacagcctggcggcgctactgctggcgctggcctccgttgatgccagcccggccttccatcagatcagcgagctggtgaaatcccagtcacgcgagggcgatccagactttgccgcgtactataaagagccgtcgaagcaaatcgacaatccgcagctgaacctggtctatatctatggcgaaagtctcgagcgcacctattttgataacgacgccttccccaacctcacccctgagcttggcagaattaaagctgaggccattgatttcagcaataccatgcagctgccggggaccgattacactatcgccggcatggtcgcctcacagtgcggcattccgctgttcgcgccgttcgaaggtaatgcctcagcctcagtctccagcttctttccacagaatatttgccttggcgatattctgaagaactccggttacgagaattactttgtgcagggggctaacctgcgctttgccggcaaagacgtgtttcttaaatcccacggcttcgatcacctgtacggggcggaagagctaaaaactacggtggcggatcctacctaccgcaacgactggggcttctatgacgacactgtgctcgacgagacctggaaaaaattcgaagagctgtcgcagtccgggaaacgcttctcgctcttcgccctgacggtggatacccaccatcccgacggttttatctcacgcacctgcgagcgtaaacgctatgatgtggacggcaagaaaaacctctctttcagcgccgttagctgcagtcaggaacatatcgccgcgctgatagagaagattaaagcctcaccctatttcaaaaacacggtcatcgtggtctcttccgatcacctggccatgaagaacagcgcctgggattatctcaacaagcacgatcgcagcaatctattcttcgtcctgcgcggcgataaaccgcagcaggagaccctggcggtgaaacgcaacaccatggataacggcgcgacggtgctggatattctcggcggcgataactatatcggcctcgggcgtagcagcctctccggccagtcgctctccggtattttcatgaatatgaaagagaaagtcctggcatggaagcctgacgtgatccgcctgtggaatttccccaaagaaatgaagaatttcaccatcgactcgcagaaaaatatgatcgctttctccggcagccatttccgtctgccgctgctgctgcgggtatctgaccagcgcgtagaaccgctgccagagagtgaatactctgcgccgctgcgcttccagctggccgatttcgcgccacgggataatttcgtgtgggtcgatcgctgctataaaatgggccagctgtggtcgcctgagctggcgctctccaccgactggtgcgtctcgcagggacagctggggggtgagcagaaggtccagcacgttgataagccgcagtggcaaggcaagaccgccttcagggacacccttatcgatatggagcgctataagggcaacgtcgatacgctgaaaattgtcgacaacgatattcgctataaggccgacagcttcgtgtttaacgtcgctggcgccccggaagaggttaaacagttcagcggtatttcgcgtcccgagtcgtgggggcggtggtccaatgctcagttgggcagcgacgtgaagattgaatataaagagccgttgccggagaaatttgatctggtgatcaccgccaaagcttatggcccaaacgccaataagccgattccggtgcgagttggagaaagtgagcaagtgctcactctggataatgacgtgactaccacgacgctgcattttgacaacccaacgcgcagcaacacgctgatcatcaccccgccggacccgcaaaccactaacgagggcaatatcctcggccactccccgcgtcagttggggatcggcatggtggagatcaaagtggtgaaaagcgaaggctaacgcaatcctgcccggcggattttcgcgccgggcagcggttgtcgtggcaggacgttaaccacacagcggctgtagttcatcagccgacagtccggtgatcttctgtaccatctctttgtcgaggccattctgtaacatactgccggcaatgcgcagcgcctcgcgtcggctgccttcctgcaagccctccaggtgcccttcttcccggccttcttcccgaccttcctgcttaagcttttgcgcgatagacatcaatgtctcctcatactgtggcagacggcgggccagccggcggagaaacacgcccggctcggccgtattaccgtactgcagcatatagtgaaacagcattctcaactgccgacggttagtgtatcccagcatcacaacggccgccaacgactccgttatgccgctgagatcgcgctggcgaatatgtttttgcatcagctccagcaaggcgactcgccgatgttgcacgatgtcatcgtccggcatcaccgtcacgtcgatcaatggaaacggacagccatacagcgtcttcgccagctgcgggtcggcaaattcatccagccagttgagggaaaaaggatacggactggttgcaccgtgataaaaaagcatcggcaccaccagcggcagcgttttgtgcccggcatccaggtggcgctgcattgcggcaatcgcatagcgcatcaggcgaaaggccatatggctatccggtgagctctggtgctctatcaccacgtaaacataccccgtgccgcaggtggtctgcaccgaccagaggacatctgaataccaggcgcgcagatcctcatcgataaagctcgccgattgcagcctcagggtagagaaatcgcaccgctgaaggatcgcttcgggaaggtagagggtgaggaaatcagtcgctgtctccgggtgacgaagaaatcgcttaaagaccgcatcgtgcggcgtcgaggtcatccgttttttcatggccatccgcttgcctgaaagagaaggtaagccggactctatcaccggtttttacccggttgggtttgacgacaattttctgggaagcgcctcggagaatagcatggcggccagcccggctggccgccatcaacacggcttagtaatcaaactgccggtagtaacggcggatattgaggtcgtggccggtatggtgttcaaagtgggccgccagccggtccaccagcagggtggacaccacgcacggcgccataatccagcggaacgcgtcatcaatgccgttcagcggatagtcgcgcgggtcgataaccaccagatggtcagttattttttcggcaaaacgctcgacgcgttcgtccagcgcccggcatctcccctcgcctttcaccagaaacagcggaacctctttttccagcagctccagggtgccgtggaaaaattcagcggagctcaccgacttcgtccgcttccactgcatctcttcgagaatacacattgagaacagatagacctcgccccacatttccgcgccgccaatccacatcatatagtcgcagtcatggtattgcgcggcaatgctatccgctcggggatcgaactggcgtttcgcctgcaggagattttccggcagtaactcgagctggctggcaaatcgcgcataatcagcaaactcgccgtgacgaaaaatgacgcggaagaataaccagtacagcagcatatattcatattccacgccatttttgtggcacatcggaatatgccagctggcggcggcagccaatggcgagtcggcgtgacgagtaatagccaccacgcggatcccctgtgccttgcaccattcggcaatggcgaccgactctttggtatcgccggatttagataacgtaacgacaaccgcatctttatttaattttttatgtccgcgatggattaactccgcggcctgttcaagatataccggcacgctggttaattctttggcaaattcattaattgccatcatcggcgccagggaaccacctaccgaagcaaaaaataatgcgctacagccgctgtcataaatatcgtcggctacggtttcagcctgtttacgcgcagcgatgatctcgcgagcactggtcaggtactcgtcctgattaaaacccaacatagttttctcctgaattttcagattttactttttaagacgcggtcaaaatcgtcgaaaatacgtttagccagatcgatgcctttcagtcctgcggtatgccaggcgagcatctgcactgggacaatcagcagcagaggcgccaggtgatgctcgcacggacagtttagcgccagcgtttgagcatcctcttcgtcacccagcgtcagggtaaaggcccggccaatggacggcgccagatagtcgcgcagcgcccgggttcgcgcgtccggcgtatcttcaataaacagcatcacatggcgggcattggcttccagataggggccatgcatataggcttccagctcaaagccgctggaaggcacgcgcaccgtctcggtaaatttggtttcgaactccttcgccacgccaaccagcgcgccgtagccggtggcgacaaagcgctcgccgctgcgcagcgtttcgctatggcggtcaataaagcgcgaggtgcggacgataacctccgggatcgccgctaccagccgctgcaattcagcgagatagtgctgctcctcgacctcgctggctttctcctgcttacgagcaatgatcagcgctatcagcaacaggttgagcaccgtcgcgctaaagccgcgggtcacaaaccctacgctctcgatcccggtattaatatccagaacgccatcgctggcgcctcctatcgggctttgcggatctgaggtcagggcgaaaaccgacttgccggaagcctgtaccttacgcatcgcctccagcgtcgacgcgctttttccgctctgtgaaatcgccaccaccagatcggcatgcgggtcgatcgcgtcgtaatgggtgaagttgtacggctctttaatgtcaagcagcacaccgaagcgttgctcaaagaaatagcgcgcgcacagagcggcattcagcgacgatccggtcgcgagcaataatatccgccgtaccgggtgctggcgggcgaaggtttcaatcggcgctagcttttgtcggtagtcgcgcaggatctgcgccaggcaggctggctcttcactgatatatgtcatcattgttggtcgcatagctcactcccgttaaaacaatccgatccacgaacccagaatgcccaccagcgccatgccgccaataattgagagcggtttaactttccgtcccagtagccagtagacgatgccaaaactcaccaacggcagcatgcagggcagaatgtcgttgataatgtcctgtacctgggttttggcctccccggcgccgaaggagagaggaatggtgatatcgatcattgaagcggtcatcgccccgactaccatcagaccgataatcgacgccccgtaggtcaggctctccatcattccgctcttctggatccgctgcaggaccccggtgcccagtacgtagccccagcgggtaaaacaccagcgcaccagaatgtgcggcacgttaaacaccagcagaaacaggatcggcccgaggatgttgcccttcagcgccaggctggtgccgatcccggtggcgatgaggcgcagcgtcccccagaagaaagagtcacccagcccggctaacggtcccatcagtgaggctttgacgttatcaatcgcagtggcatccatgtttttctgctgactgtttttctcttccatcgccgtggtgatccccagcagcagggtgacgatatgcggcgtggtattgaaaaaaaccagatgccgcttcagcgctgcggccagctcctctctgcgcggatagagcttcttcagcaccgggatcaacgcgtaaacaaaggcgagattcatctgccgctcatagttccacgagaactccatctggaaagagcgccagaacacccggcgtaaatcgcgcggcgtaatccgggtttcttcctgcgcctgcggctgcagggtctcttcagaaatcatcttcgtcgtcatcgctgactccttgttctgtcgtgatacgaggtgaattcaacgcggtgacgttaaccatgactaccgccacgatggcgccgagaatggcgataccggtcaccgggattttcaaataggccatcagcacaaaaccgaggaaaaaatacggcgccactttcttgttaatcagcagcctggcgagcatcgcgaagccgagggccgggatgatgccggtggcgacgctgagcccatgtttgataaattccgggatcgtatcgagcagggatttcaccgcgttgctgcccaccaggaatgagacggtgaccaccgcggcaagcatcagcgacaggccgaatccggcaatcaaatgcatccgctcaatgccgcggagatccgcccgttccgcatacccgtccgccttttggctaagcattggaatgaacatccccagatagatatttttcaggatcaaagtcagcgtggcgataggcaggccaagcagcaacgccgtttctgtgcctgcgccagaggtaatggcgaacgccacgccgagaataccgccggtcacgacgtcgggcgggatcgaggcgccaacggagaaagagccgataaacgccagctccagcgtcgcgcccataatgacgccggtctgtacatcccccagcaccagcccggtcaacagcccggtgacgataggccgtgaaattagcgacgtccctaaggcatattccgattgcgcgataaacgccaccagacccagtaagagagcctctaccataatctgtcctccggaattacacgcattccgcaaaaagctgtttgcgatcgttcgggacctggcgaatctccacttcgacgcccttgcccaccagttgttgtagctgttctatttctgtcggcagtaaattaatcgccttagagatatttttactgccctctttagcctttattccgccaagatttatgctttttatttcgtcgatggcgctggcaatacgccaggcgtcattaaccgactccacaacaataaataaattatatttatcggtaaccccgctttttattgcctcaatagaatcatttacatttttaatcaccagcttcaccgagggcggtttggcaagcttaatggtggttttccgcagctcatcaccagggacgctatcgttggcgattaaaatacaatcggcgccgacatattgggtccaggaaaaggccacctggccgtgaagtaatcgatggtctacccttaataatgtaatcatcatgcttcctcatttcagaagtctttatccatagtcatcgcgctggcaatcgtttgattgcagtactgaatgctctctttggcgtttgttaatgcctcggtaattaatttttcggtatcgtcttcggctgcggaaatcagcaagtcaataattaacggcagatttaaaccggataataaatggaaatgtgggcgagataaaaaacgaacaaactcgttattcacgctaccggcaaaaatatccgtaatcacgatcagctcatcctgcgccgggaaacgcgccattagcgcttccacctgctgcgtcagatcggcctcttcttccacgtaggcacacaaggtatgtatatcgggttgtttaccgaggatcagttccacggagttcaacaaaccgttagcaaagctgccatggctggcaaaaatatagtgtcgtttcatccttacctcgaaagcgcattccactgctttcttaattgcaaccgacgtgccagaaacagtggcgcgtcggctaacgcaaggataaaaaagaagagatgtgttaaaagtcttgatcttcctgaataaattctgtttcccgcgtcaggatatcgtgaatgtagcagagctctacaacgggaattttgacactatacccgctctctatgacactaaaggcctcgcgtagcgtagccagctcgcgatccggacactgccctccagtgtattgggctggggaagcgtgacgaattaatcgctctatcagacagctgatatgcacatacagcgcgaccttacgatcgttaggtacatcgcgcccggccagatgctcatagcgcagcaaaaactgctcaacctggttgatcaccttagccgtatcgaggatcgtcaccgactcgatcaaccggcgcagcgaaaagtttttcaggatcaggttgttgatctcgctgacctgctccgccgtcgccagttcgccaaaaatgcgcatcagcggacgactcccttcgccagagatcagcgaatccagcgagatccagggtagatcggcaagatgcggatccagggtgccgacgatcgccagcacctcatagcggcttagcatcggctcccgtcgcgcgtgatcggcaagggtctccacatcacaggccacaatatcaatgccaagcgcttcaggaatgctggcttttaacagcgccgacagattcgccgccgcgcccagaccggtcgcgcaggtggttaaaatcgcccgcggcttatcggtttgcgggtaatagagctggtgctcaaccgcaaggtcatcgccgatctcgcggacgatatcttccagcataacgccctgcaaaatgcgctccccgacgtacatcgccataccggtggagacattgttgatgatcgccatcggcgtactcaggcgacgattaaaatggcggtgaatggcgttcagcgatcccatgtcgaccaggattatcaatcctgatgccagggcatggctctctatgtaggccatcacctggttagcgatagcctccggcgtcacgtccagcggcatatcgaatgactcaaagagctggcttttcagcaagcggtttgccacgttggcgatgctgctggcggtagcgtaaccgtgagcgagaattatcgcccgggtcacctgctgctggctgatggcgccattcttgtggaaccacagcactaacagcagcaggtcgatacgctggggttcaatatccagcttcagcgtcaacgcaccgaggatcgcttcgcaaaagcgatacagcagcggaaacttctgtaccaggaagtcctccagctggcgggctttttcattgtttatcgtggactgcggctgtcgggatcggtggatcaggtagtggctcagcgcgtagaggcagttgccgttaaactggatattgaagcgcttttccaggcgataatactcctcccgaacctgatgagcgatcagcagcagcatctgcgagctactggagtcatgattatcaaagatcagccgatcgaagagggtttcaatctcttcccccatgctcctttgcgcctcttcccagaccgtttttttattcagcaccgcttcatactgcgccagaacccgacactgaacgtcatagatcagcccctgtaccgggtcgcgcgcacgcagcagccagaccaggctggtctgcggctcgataagcagcggctcctgcaggcccatcgcttcgctgagcgctggcgtcgcggccatgacattctccggcagatcgtgcagcctcacggtcagcatttcgcggcccggagacctggcccaggctgacgccacggcgtatttcaccacattcttcagctcgccgacgttgccccgataaacatactgcgtcaggacctgcaacagtcgcggcgttagttgcagccgggcggcaagcgtgcgcgcctcctgccagaaaaactgtagcgttagcgcctccttctcctcgcggctacggtgttgaagatcgggcaagctaaccaggatcggaattcggcgcaggaaggtggtgagaaaagtgctgtgaatatcttcggtggtggcaaacaccaaccgcagcgaaatcggcaagccttgcgcggtctcccccacccggtagatctccttacgatccagccaggtgaacagcttctcctgcccctgagcatccaggcgatggacctcatcgagaaacagcatcccgccgtttgccgcctcaaacgcccccgctttatcgctctgcgcaccggtaaacgcgcctttgacgtagccaaacaggttggcggccagcagctccggattactcgcatactgcgcgcagttaaagctcacaaagggggcatcgggcgccagcagcccctgggcgatggcgaactcatgcatcagctcagccatatagcttttgccggtcccgctgtcgccagtgatcagcagcggtagcccgccgttaggataaaacagcgcggttttcatctgctcaatcggtttacgcaggctgccgtcatgcccggtcagcaacgaaaaatggtccgcctgctccggctggcggtcgctctccgcgagtaactccgccatgctggcatactcactgcgagaaagcgggtagaactgctggcaaaaggcttttttatgcagaaaatagaccggccgggtgttgattttcaccagcacgtcctgagcgaccagctgattgagataatggctggcggtatttctttgcatcgcgaaacgccgggccagccagctggcggtaaagacctcgctcaggttatccggatcgaaaaaatcggtctgattttgcaaaaaagccaacagttccgttttacgcatcgcatccccctcttcgccattacgaagggatatgatgcgggaaaagagaggcttatcgacggcccgtgctgtttttttgcggtccagcgcacactcctggctaagccgacttcgcgtcggccagatccatcgtcatttcatactgctgcagcgagagcggcgtataaccggccgcggcaaacagcggcgtaaaagtttccgggaccgtcaccgaagtaccaatgcccgggaactgctgcgccagcgccatcagcagctcacgcgccagcccctggcggcgggcggcgggctccacccacaaaaacgacagtacagggcgcgagcccgccgtcgttagaaccgcgaaggcgcgctgttccagcgtcacgacctgacatggcagagtggcgaaggtaagcggatccagcagccagggaagctggctgttactctcctcaatggcgcgccgaagcagggacagggtgggataaagctgtaatacgcccggcaccgggggcagaagttctgtactcaggtagccgcagagcccatagcgtcgcgtaaagcccagcgactgatacagcgcgacggccgcatggttatcgcggatcacctccaggaataccgtctcgatcccctgctgttgcaaaagcatcagcagctcctgcatcagtttccggcccaggcctttgccgcgccaggacgggcgcagggcaaaggccgccaggcgagcggcactcccccggcgcgcgacgatcgcgatcgccgccggttcatctccggccagccagacgcgggaatcgaccaagctcatcccctcggcgctaaaacgctgaacaaatccctctaccgactgggtaacaggcaccaggtaggcttcaaaacaggcgttgagaatatccgttaactgcacgctgctgaactgcgtggcgggaacggcggtcagctccatacttttctcccgaaggctgctatgctgaggtgatgaaaactaacactataactgccggtgccgtattacgcctgactcaggagagcgatatcgcccttctgcccgccattgaacgttctgccgcccaggcatttcgccagatcccttctctcgcctggctggcggacagcgaggtgattagcgttgcgcgccatcatgattatctggaaacggagcatagcctgctggcggtagccgccgggcaacccgttggctttattctgaccgaaccgctcgacgatgcgttatttatcgtcgaagtcgccgtccaccaggcctggcagcaacagggcatcggccggatgctgctggagcgggttatcgagagcgcacggcagatgggctacccggcggtaaccctcaccaccttccgcgaggtgccgtggaatgcgccgttttatacccgtctgggattcgccatgctcgatgagctgaccctgcccgccgggctggcggcaaaaagggaacaggagacccggcacggcctgccgcccgagtcgcgctgcgccatgcgcctggcgttgtagacttcagcactgatttcagcggcgcaatatggtacaaagtaccattcaaaacttacccgttgttaccgtatgtcctggtcaatcgatattatttcctgcataaccgatcgctttgtggaactcacggcgaccgaaaaacgcattgcgcagtttattctcgatgatgtcgcggcggcggcggagctgcccatcgccgagatagcgcgtctgacgcaaaccagccaggcttcggtcacccgttttgcccgggcgctcggctgtaaagacgtccgcgagctgaagatgaagcttgcgcaatctcttgcggtcggccagcggtttatcctcgatgttccggatctcgaaggcgtccaggggatctatgagtcaatcatcagcgtactggagaccaaccggcgggcgctggatatcgaggcgctgaagcgcgcggtgagctggctgagcgatgcgcggcagatcctcgccctagggatgggcggcggttcgaccatctgcgctcaggaaattcagtatcgcctgtttcgcctcggtctgccggtagtcagccagagcgatggtctgctggtacgcatgatgagctcggcggtgacgccgcaggatgtggtgatcgtgctgtctctgggcggctatacccgggaaatcatcgagagcgcggcgattgccagccagtacggcgcgaaggttattgcgattacccccgccggaacaccgctggctgaacaggcggatctggtgctaccgctgctggtacgggaaaacgactatatctttaagcccagcacttcccgttacgcgatgctggcgatggtcgatgtgctggccaccgaactggcgatggccaacaaaacccaggcaaaaggcaaattacgccgtattaagctggcgctcgacagccaccgcggcggcgtcgatcggcagccgctgggggactaacttttactggcggagataaacctctccgcctgctcgcgggtacgttccacggcctgtccagcgcgataaagatcgctgcccagaccggcaccggcgcaccccgcctgtatccaggtcgccagattttccggcgtcacgccgccgaccgccagcaccggcacctccggcggcaacaccgcttttagcgcgcgaatatagtccgcgccgaatgctgatgacggaaagattttcagccattgcgccccggcatccagcgcactaaacgcctcggaggccgtcgcgcagccggcgcacaccagcatccccttatctaccgcgcggcggatcaccgccggggccgtattgggcgtcacgataagtttcgccccagcttcagcgagaaaatcaacctgttcaaccttcagcaccgttcccgcgccaatcatcgcccgctcgccaaactgacgcaccatcgccggaatactttgctgccagtccggcgaattgagcgggatttcgatatagcgaaagcctgcatttattagcgtctcaatatgatctgccgcctcagcgggttgaatgccgcgtaaaatcgccaccagcttaatcttgtccatcaatcatcctcgctatacccgaaagaaacgccgcctcgccggagcaacaggaaacggctaacccacgcgccgccatcgcctgctgataacgggcgttgagcgagtgctcaccaaccagcaccacgcggctggcgcgatagcgttcgctgaatgtcgccacctccgcgccaatcaacagcccggagagataatcgctcaccgaagtcgccgccagcgcgcctaacacccgcgcggcgcgggcgctaaaaagcccggacaataacgccggctgatttaaccctttttccataccgagggcgaaagcggcttcatccggcaactgcgcaggcagttgctggccgagcagcgaatggttaagcagcaggtgatgcagttcgccggtcatcgccgtggcgaactggcgcaccacgccgttttgcacctgcacccatttgcagtgggtgccgggcatcacgtaacactccgcgggcatcagttgccaggcgcccagcagctgcgtttcttcaccgcgcattacgtcgtaatctgcagcctgcgccactttcagccccggcacgatccacactttttccgccacctcatataactgaccgttgagcgcctccagcgccagcgggcaggccagataaggcaccggttgccaaccggcatcgctgccgatcatgcccgccatcaccaccggcagcgcggggtcaccgcgccacggcgccatctgctgctgaaataccgcttcggcgcgctgcccgttcagacgcgtgacgccgcagggcagtttcagcttgtcgatgcattcgccatcacgcatccgccatgcccgcagctgggtggagccccaatcgacggcaatatactcgttcatgattaccccttacccgcgtgaggtatgacgtttgccaatcggcagcggcggcggcgttgggcggctttcacgctcgcgggtaatcatctccagagcctgctcgcggctcatgctgctggccggggtcagtaacgtcaccacaaccgaagccaccaggctcgtcagcaccgccggaatacacgggttgccccagaacgccagccagtcgctatccaccagcaccgcaaccgatgccccggcgccgccggccagcgcggcgaccgcgccctgccagttaaagcgtgtccagaaacggccaagcatggtgcagataaacatcccggacataatcattgagatcattttggtgatgtagctgatgatgtcgttggaggtcagggcaaacagcagcgccagcgcaatcaccagaaccaggaagatccgcgacaggcgaatcgctttctccggcgcgggcatatggccggtcaccagggtgtagaggtcgcgcagcatgatggacaccgcggcgatggcatcagagctaccggaagacatattggccgacatcccggcaatcaggatcgccatcgccagcaccggcggcagcacctgggtggcaaacaagaaggcgaagccgctgttttccagctgcgggttcatggtccataccgccataccgatgatcgccggcaggaaggagaagcccagatacagcaggccggtaatggtaaaggactggcgcaccgaggagacggtcttcgccgagtaaatacgctggcgataagaaggcgtcgccagcacgccgacgccaatcaccatcgccaatgatagcgccggcagcacgcctaatttatcgaccgcgaacaggctttgcgccgccggatcgacggcctgctgaatatggctccagccgccaacgtgatgaaccgccagtatcgccattaaaataaagcccacgaacagcacgatcgattgaatggtatcgatccacaccaccgcggaatagccgccgataccgacataaaccacaaaagccagcgcgataataattttcgcgacattaatatcaatgccgctggcccacgccagatataatccgccgcctaatatatgcgcccccagccagccgatagaggcaataaaaataagtatcgcgacgaggtttttaataattttactgccgccggtgtaatacgacatttcttcactcatggtcatgaagcgaagtttacgtaccggtgcgaataaccatgccaccagcaggatccccaccgcgccgccgaggccgtaaagcatcccggcccagccgttgctgtagccaaagccgacggcgccgacgctggagccggtccccaccatggtgccgaccgtcgaaccgagagtgaggatcatcggcagcgaacgaccgccaagtaaaaagtcttcgccggttttctgtttgcgcgaaacgtaccagcctaaggtaatcatcgcgcaggcataaacggaaaaccaaatcataaatgacatattattcatggctcacatccagacgtaataaataatattcgtgccgctgaatattatgagttaacaggaaccatgcctgaaaaaaggcatagcgaacccagtggcaccgatttatttattcactctggtgccgatatcacacttttttgatgctccctcccgcaaagggagggatttattttaggtttcgagcgttattgtcgcgcagcgttaaaacaggtcacatccacttcgactttacaatccaccaccaggtccgctacgcagcagatgcgggcaggcgggttgtcgccaaagaactcgcgaaataccttattgaacgactgaaaatagcgcgcatcggtgaggatcactttaacatgcaccacgtcggccagggtgtagcccgcttcggtcatgatatctacgcagttctgaatcgccagacgcgactggtcgacaatcccgccttccacgacttcgccatttttcatcggcgtctggccggaaacgtacagccagcctcccgcttccaccgcccgcgcgaacggcaggtgctgcccgccggtaccggtaccaccttctacgccataacgcttgatactcatactcaactccttagtccatccgacgacgcaggaaacgccctgcccgtccggtaattttcttatcactgccgtagctcatcacgccgttgaccatcaccgcctcaatgccgtccgccggtcgtttcgggtcggagaaactggcgacatcgcgcaccgtctgcgggtcaaacagcaccaggtcggcaaagtagccaattttcaccagcccgcgatccgccagctggaagcgcgccgccgacagcccggtcatcttgtgtaccgcggtagtcagcgggaatagctgctcgtcgcggctatagtggccgagcacccgcgggaaggcgccccacaggcgcggatgcggcatcggatcgttcggcagtccgtcagagccaatcatggtgaccggatagcgcatcacccgccgtacgtcctgctcatccatgttgtgataaatagcgcccgccggcatcagccgcgccgcggcgtcgtgcaggctcacctgccactcatcggcgatctgctgcagcgttttccccgccagctccggctgcgcttcggaccaggtgatcacgatatcaaactcatcggtcacctgtttcatatccagcgtcgacgagctggcggaatagggataacagtcgcaggcgatatcctgctgctggcgcatctcatcaaaaaaggccagcgtctctttggtacgcccccagttttttgccccggcgcacttgtggtgcgaaaccaccaccggcacgttgccgtggcgaccaatacggaaggcttcgtccagcgcctcgagaatcggctcaaactctgaacgtaaatgggtggtatagacgcccttcccggccgccagctcttccgccagcgccatcacctcctcggtggtcgactggaaggcgctggcgtaggccagcccggtactgagccctaatgctccctggcgcagcgcatcgcgtagctgtacgcgcatgccggcgatttccgtctcgttcgccggacgaaacagatcgtccatatggttattacgcagcgcggtgtgaccgattaacgtgccgacattcagcgatggtcgcgccgcctccaccgcatgggcataagcctccacggtgggatagataaagtgctgctgctcgccgaggagattcattgggtccggcacttccccccgcatggtggcggtcgccgcactgatcccgcagttgccgacgatcaccgtcgtcaccccctggctgagcttcggcaagtactccggcatgcggatcacgttgatatcatcatgggtatgcacatcaataaagcccggcgccagtacccgcccctggccatcaatcacctgctccgccgcaacgtccagcgccggggcgatagccataattcgatcgcccttcaccgccacatcagcacggtattgcggcccgccgctcccgtcgatcaccgtgacgtttttgaaaagccagtcaactttcatagcaattactccctttcgacatgccgataagttaaccatttacaagcgcaaaaaacagtggaaaactacgcaaaactcagatcgttttgtgatacttttattcaaaacgaataacatttttatgttaaaaatatatttatcaaatagttataaatgatacccagcgactaaccgattataaaccctgaaaggatagtgttatgaaataccattcagcaccgatcatcccgcacaaatccgccttcatgtccgcgccggctaatctgctggcggaagaggtctgtctacccgccgcgctgctaaaaaagtcggcactggaaaataatatttcatggatgcagcgctacgccgacgcccgcggcgtatcgctggcaccgcatggtaaaacgacaatgacgccatggatatttcaggcgcagcagcgagcgggggcgtgggggatcggcgtgggcagcgcctggcaggctagcgcggcaatggccagcggcatccaacgcgtcctgatggtcaatcagctggtcggcaaagccaatatgcaggtggtcgcgcagctaaaagcccactatcgggcggtggattttatctgctgcgtcgatagcgaggtcaacgtgcacgccctctccgcattcttcgcagaccagggacaaacgctggatgtgctgattgaacttggcgtgcctggcgggcgctgcggctgtcgtagcgttgatgacgcgctggcgctggcgcagcgggtaagcgacctgccggggctacggctacgcggtctggaactgtatgaaggggtgctgcacggcgacgatccgcagccgcaggtggaagcgctgttacagcaggccgcggcgcttgcctgccgcatggagccgctggttgacggcgaatttattctcaccggcgcgggcaccgtctggtatgacgtggtgtgcaacatctggctggcggcggcaaaaccgcgccgctgccgtatcgttattcgccctggctgttatatcacccacgatcgcgggatctacgatctcgcccaacaagagctgatcgcccgcgatccgattgcctgcgatctcgccggcgatctcacttcagcgctggagctgatggcgatggtgcaatcggtgccggaggcggatcgcgcggtagtgaatttcggcaagcgcgactgcgctttcgacgccgggctgccgcagccgatcgcccattatcgtaatggccagcagttagcgctgcgcgcggagtcgatcgtcagcaccggcatcatggatcagcactgtatgctgcgcctggcgccgggcagcgatgtgcaggtcggcgatattctgctgttcggcacctcgcacccgtgtctgacctttgataagtggaagacgttgctgctggtcgatgacgactacaacgtgctggacgagctcgacacgctgttttgacaggcatccgggtagcggcgcttcgcgccttacccgccccggcgcaaggcgcaaatctcatcatgcaatgaacgactgataatgaccccctgccgttcactctgctggcggcaggcaaaacgccgctcgcccggtagacgcgccccttgttcctgcatacccatgaacagcgtttcggcgcgcgccagctgctctggtgcctgcgcgccgagaaagcgctgcggatccagcgccagaatcagctcgccgccgtaggggagaccgcccgcgccgttatcccacgccagcgattcggcgctggtcatatcgccgctaagcggcccggccaacagctcaaccattgccgccagcgccgagcccttatggccgccaaaggttaacatcgcgccgttcagcacctctgcggcatcggtcgttggctgtccctgactgtcgattccccagccttccggtagcgctttgccggcgcgctgatgcagctggatctcgccgcgcgccgcggcgctggtcgccatatcaacaataaacggcggcttatcccgccgcggccagccgaaggcgagggggttggtgccgaacagcggacgtgtgccgcccgccggggcgacccaggcgtggcttggcgtacaggccagccctaccagccctgcctcggtcaacggctcaatatcggcaaacagcgcggaaaaatgaacgcagcgattgattgccagcgccgcaatgccattgtggcgcgccttctccagcagcagcggcagcgcgcgctcgtaggccagcagtgaaaaagcgcccccggcgtccgcccgcgcaatccccggcgcctagtcatggatctgcggctcggcatcgggcgataccttacctttgcgcagggtatcgacaatgcccaacagccgccacaggccgtgggaagcgcagccgtcgcgctccccggcggtcacattgcgggcaatcgccgccgcgtggtcggcgctaaatccattggcgctgagtacctccagcgccaggtcataagcttcaggtaacgatagagttaccgactccatactgttctcctttactcttcttcgtctccgctaaagttagcctgcggcaggcagctgcgcgcgccccagtagtaaatccccaacgacatcgccgccatccgggaggtgaacggcgcgcggctgaatgcccgcccctccgcgcacagcgtgctgtttgaaaccgccgacggcggcggcgtggtttactggcagaaactgatcctctgctgcagcgcgggcggcctgcaggcggtggcggatacgatgaaccaggccggaggcgacgtgacgaatatcattgagcaagcgctgctcccggcgctggcagcgcttcgccgacgccataaaccgcaccttccggctggcggagtcgttgaaaaacgcggcgacgccggagagcctgctgtgccgttgcgaagatgtgcgctgcggcgacgtagctgccgccgacgactggctgcaggccaaactgacccagcgcccgctggttgtacggctggccgctgccgcagccgagagagccgctgtcccccgcccgcgcggaaacgcttattgccctcgcccggccgagcgccgagccgtaaccgctactcttcttcatcaccgcgcccggcagggacgccaagcgcaataaactcctccagcagggaggtcagttgctgcagcttttccgtggtgaactgggcctccagcaggcgataggtctcttccacctccgcctgggcgctttcgtacagcgcagttccggcaggcgtcagcgagacgtacagcttgcgctgatcgttaactggctttaagcgcagcaccagcccatcccgctccatgcgcgtcaaaataccggtcagactggggcgcaggatacaggcgcgaaaggccagatcgtgaaagtccatcgacggacgttcggcgagaattcgcacgatccgccactgctgttcggtgagattgtgccgtttgacgatcggtcgaaagtaggccatcgccgcttcacgcgcctgcaacaaggcaatggttaatgaatcatgcatagtatcccctcaacagcctcaccaaaaacttattaataacttaataattagcgttaatcctgccatgtacaaccggtttctgcacctgaaaagtaccagtcttttcctgaaaaatattcaacttattgattgacaacaaataagtaattgttatgtaaatattgtgttaatccgatcacaaaacattcacttccagttgctaaacctcagcgcaaagcataaaagatgatcattaacatattaatgaaatccctttgaaccgaaatctgtcccagaggagtggtgaatgaaaggtaccatcttcgccgttgcgctcaatcatcgcagccagctcgacgcctggcgcgaggcgtttcaacaggccccctacaagacgccgccgaaaaccgcggtctggtttatcaagccgcgcaataccgtaattggcgatggcgaagcgatcccgtatccgcagggcgagaccgtacaaagcggcgcaacggtggcgctgattgtcggcaaaaccgcgcgtaaagtggcggcggaagaggcggcgaactatatcgctggctacgcgctggctaacgatgtgagtctgccggaagagagtttttatcgcccggcgatcaaagccaagtgccgcgatggcttctgccccatcggcacgctatcggcggtacgcaacgtcgacgatctgaccatcatcaccgaaattaacggccgcgaggcggatagctggcataccggcgatctgcagcgtaatgcggcgcagctgctgagcgccttgagcgagttcgccaccctcaatcccggcgacgcgatccttatcggcacgccccactcccgcgtcacgctgcgccccggcgaccgggtacgtattctcgccgacggtttcccggcgctcgaaaacccggttgtcgcagaaggagagctggcatgaaacaggcacgcattgaatggcaaggacaggtacgcgacgtgctggtcaatgaacgcgaccaggtgcgcctggacgatggcacggtattaaaagaaggtgaattccgctggctgccgcccgccgacggcacgctgttcgcgctggggctgaattacgccgatcacgccagcgagctggaatttaaaccgccaaccgagccgttggtgtttatcaaagcgccgaacacctttactggccaccagcagcagtcggtacgcccggataacgtcgaatacatgcactacgaagccgaactggtggtggtgattgggaaaaccgcgcgccgcgtcagcgaagccgaggctatggattatgtcgccggctataccctgtgcaatgactacgcgatccgcgactatctggaaaactactaccgcccgaacctgcgggtgaaaagccgcgacaccctgacgccgatcggcccgtggatcgtcagcaaagaggcgatcccggatccgcataatctggccctgcgcacctgggtcaacggcgagctacgccagcagggcaccaccgccgatctgatcttcagcatcccgttcctcatcgcttatttaagcgaatttatgaccctgcaaccgggcgacatgatcgccaccggcacgccgaaagggctatccgacgtggtaccgggcgacgaggtgatcgttgaagtcgagggcgtgggccgcctggtcaaccatatcatcagccagcaagcgtatgaggagacactgtcatgaaaaagattaaccattggatcaacggtaaaaacgttgccggcgcagactattttcataccaccaacccggccaccggcgaggtactggcggaagtcgcctccggcggtgaagccgaaataaaccaggcggtggcggcggcgaaagaggccttcccgaagtgggctaacctgccgatgaaagagcgcgcgcgcctgatgcgccgcctgggggatctgatcgatcagaacgtcccggagatcgcggcgatggaaaccgccgataccggcctgccgatccaccagaccaaaaacgtgttgatcccgcgcgcctcacacaatttcgaatttttcgccgaagtatgccagcagatgaacggcaagacctatccggtcaacgacaagatgctgaactacaccctcgtgcagccggttggcgtctgcgcgctggtgtcgccgtggaacgtgccgtttatgaccgccacctggaaggtggcgccgtgcctggcgctggggaataccgcggtgctgaaaatgtccgagctgtcgccgctgaccgccgatcgtctgggcgagctggcgctggaagccgggatcccggctggcgtgctcaacgtggtgcagggctacggcgccaccgctggcgacgcgctggtgcgccatcatgatgtgcgcgccgtctccttcaccggcggcaccgccaccggccgcaacatcatgaaaaacgccggcctgaaaaagtactccatggagcttggcggaaaatcgccggtgctgatttttgaagatgccgatatcgagcgcgcgcttgacgccgcgctgttcaccatcttctcgatcaacggcgaacgctgcaccgccggctcgcgcatctttattcagcagagtatctaccccgagttcgttaaacgcttcgccgagcgcgccaatcgcctgcgcgtaggcgatccgaccgatccgaacacccagatcggcgcgctgattagccagcagcactgggagaaagtgtccggctacattcgcctcggcatcgaagagggggccaccctgctggctggcggcgcggataaaccgtccgacctgccggcgcatctgaaagccggcaacttcctgcgcccgacggtgctggcggatgtcgacaaccgtatgcgcgtcgcccaggaagagatttttggcccgggcgcctgcctgctgccgttcaaagacgaagcggaagggctgcgcctggcgaacgatgtagaatacggcctggcgtcgtatatctggactcaggacgtcagcaaagtgctgcgtctggcgcgcggtattgaagccgggatggtgttcgtcaacacccagaacgtgcgcgacctgcgtcagccgttcggcggcgtgaaggcctccggcaccggccgcgaaggcggcgagtacagctttgaagtgttcgccgaaatgaaaaacgtctgcatctcgatgggcgaccatccgatcccgaaatggggagtctgatatgggtaagttagcgttagcagcaaaaatcactcacgtgccgtcgatgtatctgtctgagctgccggggaaaaaccacggctgccgtcagggcgcgatcgacgggcataaagaaattggcaagcgctgccgtgaaatgggcgtcgataccatcatcgtgtttgatacccactggctggtcaacagcgcctaccacatcaactgcgccgaccattttcagggcgtctacaccagtaacgaactgccgcatttcattcgcgacatgacctacgactacgacggcaacccggagctgggccagcttattgccgacgaggcggtgaagctcggggtgcgtgccaaagcgcacaatattcccagcctgaagctggagtacggcaccctggtgccgatgcgctacatgaacagcgataagcacttcaaagtggtgtccatttccgccttctgtaccgttcacgattttgccgacagccgcaggctgggtgaggccatcctcaaagccattgagaaatacgacggcaccgtggcagtgctggccagcggttcgctgtcgcaccgctttatcgacgaccagcgcgccgaagaggggatgaacagctacacccgcgagtttgatcatcagatggatgagcgggtggtgaagctgtggcgcgagggcaaattcaaagagttctgcaccatgctgccggagtatgccgactactgctacggcgaaggcaacatgcacgacacggtgatgctgctcggcctgctgggttgggataaatacgacggcaaggtggagtttatcaccgagctattcgccagctccggtaccggccaggttaacgccgtgttcccgttgccagcgcaggcgtaagggggccccatgccgcattttatcgccgaatgtaccgacaacatccgcgagcaggccgatctgcctgggctgttcgccaaagtcaacgaggcgctggccgccaccggcatctttccgatcggcgggatccgcagccgcgcccactggctggatacctggcagatggccgacggcaggcaggattacgccttcgtgcatatgaccctgaagatcggcgccgggcgcagcctggagagccgtcaggacgtgggagatatgctgttcgcgctgatcaaatcccacttcgcgacgctaatggagagccgctatctggcgctgtcgttcgccatggaagagctcgacccgacgctgaactacaaacaaaacaacgtgcacgcgttatttaaataatgtgcaaattgcccggtggcgctgcgcttaccgggcctacaacggccatgaatttgtaggccggataagcgaagcgccatccggcaatacaatgccacaggaatcactatgctcgataaacagacccgaaccctgatcgcccagcggttaaaccaggccgaaaaacagcgtgaacagatccgcgcgatctcgctggattatccatcgatcaccattgaggacgcgtacgccgtccagcgcgagtgggtcgagatgaagatcgccgaaggccgcgtgctcaaaggccacaagatcggcctgacctctaaagcgatgcaggccagttcgcagatcagcgagccggactacggcgcgctgctcgacgatatgttctttcacgacggcagcgatattcccaccgaccgctttatcgtgccgcgtatcgaagtcgagctggcctttgtgctggctaaaccgctgcgcggcccgaactgtacgctgtttgatgtctacaacgccaccgactacgttatcccggcgcttgagcttatcgacgcgcgctgccacaacatcgacccggaaacccagcgtccgcgcaaagtgttcgacaccatctccgacaacgccgccaacgccggggtgatcctcggcggccggccgattaaaccggacgagctcgacctgcgctggatctccgccctgctgtatcgcaacggcgtaattgaagagaccggcgtcgccgcgggcgtactcaatcatccggccaacggcgtggcctggctggccaacaagctggcgccgtacgatgtccagctcgaagccgggcagattatcctcggcggctccttcacccgcccggtcccggcgcgcaagggcgataccttccacgtcgactacggcaacatgggcgccatcagctgccggtttgtctaggagaaacaccatgaataacgcctttaaagacgccttaaaagcgggccgtccgcaaatcggcctgtggcttgggctgtgcagcagctacagcgccgaactgctggccggcgcgggcttcgactggctgctgatcgacggcgaacacgcgcccaacaatgtaccaacggtgctgacccagctgcaggccattgcgccctaccccagccagccggtggtgcgtccgtcgtggaacgatccggtgcagatcaaacagctgctggatgtcggcgcgcaaaccctgctggtgccgatggtgcagaatgccgaagaggcgcggctggcggtcagagccacccgctatccgccagccggcatccgcggcgtcggcagcgcgctggcccgcgcctcacgctggaatcgcgtcccggattatatccaccaggccaatgacgccatgtgcgtgctggtacagattgagactcgcgaagcgctgaaaaatctgccgcagatcctcgatgtcgacggggtagatggtgtgtttatcggcccggcggatctcagcgctgatatgggccacggcggcaatccgcagcacccggaagtgcaggccgccattgaagatgccatccagcaaatccgtcaggccggcaaggcgccggggatcctgatggccaatgaacagctggcgaaacgctatctcgaactgggcgcgctgttcgtcgccgtcggcgtcgataccaccctgctggcccgcggcgcagaagcgctggcggcccggtttacccacaacgcaaccaccacaaccgataacaataaatccgtctattgaacggataatgtggagcgcaacatgactacctctaccctgcaacacaatgataataaagccgttgaagtagaaaaccgggtgatcaaaaagctgttccgccgcctgattaccttcctgtttgttctctttgttttctcatttttggatcgaattaatatcggcttcgccggtctgacgatgggtaaagatctcggcctgacctccaccatgttcggcctggcggcgacgctgttctacgtcacctacgtgctgtgcgggatccccagcaatatcatgctggcgaaagttggcgcgcgccgctggatcgccgggatcatggtggtctgggggatcgcctcgacctgcaccatgttcgccaccagcccgcatacgctgtacatcctgcgcatgctggtcggcatcgccgaggctggttttctgccggggatcctcgtctatctgacctggtggttcccggcctaccatcgcgcccgcgccaacgccctgtttatgatcgccatgccggtgaccatgatgctcggctcgatactttccggctatattctggcgctcgacggcctgtggaacctgaaaggctggcaatggctatttctgctggaaggcctgccgtcggtggtactcggcgtcgtcacctggttcttcctcaacgacacgccggataaagccaactggctggataacgaagagaaacaggcgctgaaggcgatgatcgatcgcgaacgggaacatgcggcgatcgtcccggcttcgccgcgttccacgctgcgcgaagtactgacgccagcggtgctgatgtataccctcgcctacttctgcctgaccaataccctcagcgccattaatatctggacgccgcagatcctgcagagcttcaacaccggcagcagcaacatcatgattggcctgctggcggcgatcccgcagttctgcactattttcggcatgatctggtggagccgccgatccgatcgccgcaaagagcgcaagatgcataccatcctgccctacctgttcgccgcggcaggttggctgctggcttcggcaacgcaccacagcctgatccaactgatcggcattattatggcttcggtgggatcctttaccgcgatggccattttctggaccaccccggatcgggtgatcagcctgcagtcgcgcgcggtggcgctggcggtgatcaacgctatcggcaacgtcggctctgccgtcagcccgctgttgatcggcattttgcgcgataccaccggcagctttagctccgggctgtggtttgtcgccggattactgatcgtcggcgcgctggtgcttacccgcattccaatgagccagcgtgaggacgccgccgccgcgccgggcttagcggcgcaaaaaggccactaaggagcgggtatgtgccagcattccatcgccaacatcgacatcaataaagattacgacgagagtctgggtaccgaagaggtgcactaccagtcgttctcccgcatggcggccttttttggccgcgacatgcaggcgcatcgccacgaccgctatttccagatgcactaccttgataccggacagattgagctgcagcttgatgaccatcgctattcggtgcaggcgccgctgtttgtgataacgccgccctcggtaccgcacgcttttattaccgagtccgatagcgatggccatgtgttgacggtccatgaggagctgatctggccgctgctggaggtactttatcccggcacgcgggagaccttcggcctgccggggatctgcctgtcgctggcggataaacccgacgagctggcggcgctggcccactactggcagctgattcgccgggaatctaccgcccagttgccggggcgggagcataccctggcgctactggcgcaggcggtctttaccctgctgctgcgtaacgcaaagctcgacgatcacgccgccagcgggatgcgcggcgagctgaagctattccagcgctttaaccagatgatcgacagccactaccatcagcactggacggtaccggattacgccagggagctgcatctgaccgaatcgcggttgaccgacatctgccgccgcttcgccaaccgttcgccgaagcggctgatattcgaccgccagctgcgcgaggcgaagcgcctgctgctgttttccgatagcgcggtcaatgagattgcctggcagctggggtttaaagaccccgcctattttgcgcgcttttttagccgccaggtcggctgctcgcccagcagctaccgggcgcaaaaagtaccggtgtcgtaataccccggcggcgctgcgcttgcctgggctacagaccgtagggcgggccagcgccgcgccagccggtaaaagttgcagagatcacaaaattcactcccgcctgaaaagtacccgccgttgtcgcaaacgtcccttcacgacaagcgccataaccgcttcaattaaacaacaaaaacaaaacatatatttaacataattattccgataaatactgaagaggcccctatgaaacctgaagatttccgcgccgacgcgaaacgcccgttaaccggtgaagagtatttaaaaagcctgcaggatggccgcgaaatttatatctacggcgagcgcgtgaaagacgtcaccacgcatccggccttccgtaatgccgcggcctccgtcgctcagctgtacgatgcgctgcacaaaccggagatgcaggattccctgtgctggggcaccgataccggcagcggcggctacacccataaattcctccgcgtggcgaaaagcgccgacgatctgcgccagcagcgcgacgccatcgccgaatggtcgcgcttaagctacggctggatgggccgcaccccagactacaaagccgccttcggctgcgcgctgggcgccaacccggcgttttatggccagttcgagcagaacgcccgcaactggtacacccgcattcaggaaaccggcctgtactttaaccacgcgatcgtcaacccgccgatcgaccgccacaagccggctgatgaagtgaaggatgtctacatcaagctggaaaaagagaccgatgccgggatcatcgtcagcggcgcgaaagtggtcgccaccaactcggcgctgacccactacaacatgatcggcttcggctccgcacaggtgatgggcgagaacccggacttcgcgctgatgttcgtcgcgccgatggatgccgaaggcgtcaagcttatctcccgcgcctcctatgagatggtcgccggcgcgaccggatcgccgtacgactatccgctttccagccgtttcgacgagaacgacgcgattctggtaatggataaggtgctgatcccatgggagaacgtactaatttatcgcgactttgaccgctgccgtcgctggaccatggaaggcggttttgcccgcatgtaccccctgcaggcctgcgtgcgtctggcggtcaaactggactttatcactgccctgctgaagcgttctctggaatgtaccggcaccctcgaattccgtggcgtgcaggccgaccttggcgaagtggtggcgtggcgcaacatgttctgggcgctgagcgattccatgtgctcggaagcgacgccgtgggtcaacggcgcatggctgccggatcatgccgcgctgcagacctatcgcgtgatggcgccgatggcctacgccaagatcaagaacatcatcgagcgcaacgtcaccagcggcctgatttatctgccgtccagcgcccgcgatctgaacaacccgcagatcgatcagtatctggcgaagtacgtgcgcggctccaacggtatggaccacgttgaacgtatcaaaatcctcaaactgatgtgggacgccatcggcagcgaattcggcggccgccatgaactgtatgagatcaactactccggtagccaggatgaaattcgcctgcagtgtctgcgccaggcgcagagctccggcaatatggacaaaatgatggcgatggtcgaccgctgcctgtccgagtacgaccagaacggctggacggtgccgcatctgcacaataatgctgatatcaacatgttggataagctgctgaagtaattcacagcgggaggtcataatgcaattagatgaacaacgcctgcgttttcgcgatgccatggccagcctgtcggcggcggttaacgttgtcaccaccgcaggcaaagccggccgctgcggcattaccgccacggcggtatgctcggtgacggatacgccgccatcggtgatggtttgtatcaacgccaacagcgcgatgaacccggtgtttcagggcaacggcaagttgtgcatcaacgtgctgaaccacgaacaggaaatcatggcccgtcatttcgccgggatgaccggggtgacgatggaagagcggttcgccctcagcggctggcagcagggcgcgctcgggcagccggtgctgaagggctcgctggccagcctcgaaggcgaaattagccaggtgcaaaccatcggtacccacctggtgtatctggtggagatccgcaatatttccctgagcccgcaagggcacggcctgatttactttaaacgccgtttccacccggtgatgatggaaatggaagtcgcggtgtaatggcctcgcctgcctctccccggataacggggaggggctacacagattcgcgttagccttcctgctgggcaaactgtgtcagcactgcgccaccttctggtactttccgcccgtgtcgtagtccgtcgtcgccgtccggctcacctgcgcgctgatttgctcctcgctcgggctgccattccctcccgctacctattacgatttttcttgtagccctggtaataaatccaccaacaaccagtagctatcaacgcccctgtgaaacatgcagcttttgtatacttccatgtatcactccaaatcagctcaaatgggatgtggtaaatcaataagaggtaacctctaatgagcacgtatataattaaaaacaatacgatcattgctacattgcaagcaaaaaatagatagaaaaaaataaagaaccacgattttctattcatttttgtttccctttttggaatttcacacctgttttacccgcttgatcattgaggatctctgtcaccgcactacccaaggcattaccagcaataccaggtactggattaatcggcagcggtttggatattcccatcccgacatctgtccagatccagtctttccatggcttcattggattaaggactttatcaaacggcaattcaactagtttacctgcaccatagctcatcccagaggccaaaccattaattaagccgcctgtaaaaggattatcccctttcaatagctggatgttgcaccacctgccgcattccagctcattgttccctttaatcctgtatttctggtaaaagctccaacatacgtcgcaatgagcacatccgttggattaacttctccattaataagatactgaataccagcatttgccgttccgcctatcgcgccagtaatctgcattcctcccggcagatagattagccccgctgacttccaatcctcttggctataaatagcgctactaattggtaataagtagacaatcttttaaacatgagttaattgccccctcatattcataacatatattaaaaccctttaactctaaaaaaatgaaacaaagaaaatcctacaccacctacagctccaccacaaaagctaaccttcacagctctccatatatcactccagcagataaaatattcaccaccaacgagccaaagcaaaaatgatataaataatttaaagtccacacaaacgacaaccacacttaaggaaacaataaaaaaaatcaaaaaagctacaagtatacgcttaaaaaaatcattcattagtatcacttaacttttcaataaggagttcaactcctttcccccaccgatggcagctgttaccaaagcccccttaggcaatatgcctaacccaacagtatctgcctgatgggctgatactactgcattcccttctgccacatcttcagcaagttttcctttatagtctgtatcgcagtctggcgtctggctgaaccagaacccgaggtttgttccagcgctcgctccgaaagcattattctccacactaatcccaactctgtggatgaatttttatcctatctttgctctaaaatccttttagtttaaatagtctggcaataacaaaaaccgcaccagtgaaggttccaatcacacaaccaattttaatggttttgagtatatcggcttttgtcaaatcgaaagttcctgttagcatccaaactaaaacgtctatagacaaagttatacataggaaactaacaataatcccaagaatacaggcgataaatagaatcagcaggtttagtattttctcatggaaggatttcatttcaatttctcctcaatgattggttcgagttttttcccccatattctgaagagaaagatgctcctatgtcgccaaaactgcctggaatgttactcggtgtaacttcttttaagataccaaagtcacctttaatctcagtatacttttgcagaacaggattaaacttcggatcccaaccgtctttccaccagtttacccctgcatttgtaccccaagaaattcctttgcctataccgtaaccaatgccagcaccaataccatttgttattgccccagttagcggatctttattgtctatccagtttcctaatgcaccacccgcagcattccagccaacggtacctgcgagaccgttacccatgctgataacgttcacccaacctgctatagccgcatttgccggatctatcgtgccatccgccagataactgatgcctgcattcgcaccggctccaagaccccacatagcctgaacgccacccggtaacaaggtaacactacctgtagctagcgcaagtccaacagcatcccgctcatttatcgctttctgacatgcgctcccgccaggattatcagaacaactcgccatatcgacaccatgctgacgtatccatatggcctgagcatcttcacttccactcagtaaattattctccaccgcgttcttcccggcctgcgcacccgccaccgcatccgcgctgctgcctccgctaagcacccccatcagtcccgccgccagcgtactcagcgcgcttatcgtcgacttctgctcttccgacagctcttctgtcttaacacccggataatattccgccgctatccagcgccccagcagctcgccactcactgcgcctgccgctcccgccagcgcgctgttatttcccgatgccgccgctatcgctccccacaccgcgtgcgccatcgcattggcttccacattcaccttacccgtcgcgctgtccgtcgtctggctgtgaatgatttccgccacatacggactcactgccccgctcgccgcctgcgccaggttgccgcccgccagaccctgcatcgccgccgttaccgcctgcgccaccttctggtactttccgcccgtatcgtagtccgccgtcgccgtccggctcacctgcgcgctgatttgctcctcgctcgggctgccattccctcccgctaccagcttcgcccgcgccgccgggtcgctctgcgccgcctgcgcgttcagcttgccctgcgtcaccagcacatcactcacctggcgcccgatttcacctgtcttctgcgctgtcgccagccggttctgctctttctccttatcaaatatcggactcagcgtctggttcgcatgcgccgcatcccggcttaaccccgtcacgtcctgctgctgattcgcgccgtcgcggataacgatactgccctcgctcaccgccgcccgcgtcagcgaactgtcgctgccgctcccgttcgcccccatcagcagaccgctggccgcattcccgaggaactgccctgccacgctaccgctcgtgctcactcccgcgctctgctgctccacgctgtactcggcatagtttttaatatcccggaaacccagcgtcccggtatccagccggttcagctccgccgcctccgtgctcgccagcacgctgccattcagctgcgtatgcccgcccaccttcacatcaaaaccaccctcaccggcaaaaatccccgtctgcgcctccaccgacgcccaggtgctgtgcattttgctctggctcaggttaagagaccccgaaccgccgcccatgctgccgctcgcccccacgctgccgctacgctgcttcgaatcgtagttatcgctgtcctgctcgctggtcagcgtcaggttacgcccgacgtccattgtcacctgatgaccgctcacctgcgccccggtcagcgtcgtatcgcgaccgctgacgatagtcacccgctcaccggcgctgagggtcgtttcgttatgcgtcaggctgttgcccttctcgtggcccttcgcggcgttggcgctggcgctgaccgtcagcccgttcgcgccctgaccgaagttaataccgacgccaaacgaactcccatggctctcgtttttaccgctcagggtgctggcgttctccgcagagaataaattcacatcgcgcgcggcattgagcaatgcgctgccgctggcctgcagctggctgccctcaacgttgatatccgtctccgtggcgataatgctgagattgttgccggccatcaggctgctgccgcggctggtgttctgcgtttgtcgctgagtggatttcgaggactgtctaccccaggaaaggttgacccctatcatgctctccggactggaatccgcagtctgcatctgcgatgcctgatacgcctgtacgcccgataatgccgactgcagcccgctcagcgcggcgagacggccattgctctcggtgctggcctggttggcgctggaaaccgcggtattaatggcgctgcccaccatcccggataacgccagcgtcaggccgctggttttctgctccacggtatgggtctgggtgctctggttttccgctgccagaatattcacggttttaccggtcaacgccatattgttgccggccaccaggtcagatccctgaaccgtcaatacattaccggcgctcaggctaaggttgccctgtgagcttccgacggtactggcggcgctactcagcgccgtcgtcacatcgttggctttcagcgacgaactgccgacgctgaagccgacaccgccggtgccggaaaagccgctatgtttctctttacgtagatggttttcctggcgactctcctcggcggtggtaatggtcaggttacgccccgccacaaggttgacgtcctgggtgccggcaacactgctgccggataccagcaggtcgcgcccggcctgcatcacaatacggtcaccgctaaaattgctgccgatggcgttctgcgcccacacttcatcgtgagtggtgagcgagcggcgagccagcaggccgctgctgctttgatggctattttccgtcaggtgccatgaggactcgccgctgctgaggttaatatcattgccggcggcaaccgtcaggctgctggtcgccgtcacgctggcggcgcgggcaatcatatcgtggccggcggacagtgccaccgcgccgccgttaatttgcatgccgatatcactacgctgagtcaaggaacgatcgttgcctttcccccagtttccgctttcgctatgggtggtggcgagcgtctgcaggttgagatcgttgccggcgataatctgcgtctggctgcccgccgcgctgttactcaccatgcttgccgtcagattaatgttatgtaacgcctgcagccccaactggccgttttcattctggacataaatccccgccggccgatcgaggctgatgttacccgggccgccgccgagggtgctggcgctgttgatatcacgcccggcttgcgcgatcaggctatcgccgccctgcagcgttccgccaatattgttgatatcagtacgcgcgtttagcgtgagctggttgccgccgatatagccgctgttatgaatgttttccgcggttagctgggtcacgccgcggctgtggatgtgcccgctgttggtcacatcacggctcacgctgaacgccacgttttcaccgccgagcaacgcgccgctgccatcgagatcgcccgctttaacccgcgcataaacctgcggcaccagcacctgctgcacggagccatccgttagcgtgacctctctggcgaccagccagaccatatcgctggtcagcagcgccatctgcgctggcgtcagcgccaccccgaccgtcaggttgtactgtttggcgaaggcgacgcccgcgtccatcagcgcccgatactgctcttcatcgttactgtagccctgcaggtagcgcccgccgctcagcttaacgatctgctcacgcaccagccgctgttcgtaatagccgtcgccaagccgcttcatcgcctgatcaacgcccagctgattttgcatgtagtcgctggcgagccacgctttaccgttggtaaaacgcggatcggtttccaccagatagcctgctttagcctgcgggtcgatctgatacaggctgctgacaggaagccgggtatccggtgtgacgacgcgaataaccgttccgtcagcgttaaccggcgtcacttccaccagccgtccggcgggtagttcgcctgtttcatcggcgcgatcgcgcggattaatcacgccgctatggccatcaatttgggtattgccctgccacttcatggtttgcaaatcgatggtctgaaccgtcggcgtcggttcatattcgctgctttttttcccctggctggttttggtgccgccaaacgggcggctggtctttttctcataccaacgggtctgggtgccgacgtcggtggtcacccgtttgccggtcgtggcgacgttgtttagttcgccaatcacgccaccgagcgctccttcggcgataatctggctatcgtagttattcagcttatcgctgttgatgatgagccgggcgccggagaggattttgccaggatcgctttccaccacctgcgtttccacaacggtacgctggtactggtattcatagaactcatcgccgcggcttccgtccggcatgatggcgtcgtgaacgccgtatttgtttttatagctggtatcgaccagcgaccagtcgaagcgctgtaccgatcctttcagcgccgcctcatggcgccatgactgctcgaccatcacatctttcgtcactagatggtcgttgtagttattgatttgttggatatcgagcgccatatcaccggcggactcaagcgttgcgctgtggttattaaacactcccgcccggccgctgagcgaaccgtcttcggcaagctggccgccaatggcgagcgtaccgtcgctgtagatcagcgcgtgatcctggttattgagcgtgccgacgcccattgccagcgatgcccgtgcggcaatcgtcgccgccacgccgttctccgcggcgttagtcagcgttgccgcctgcagcgcgacggcgtcgccgtacaggcgcccgctgccgatattggttaacgtcgtggcgacaatatgggttaagccaccgtcaatcagcccccgattgaccagctcgccgttgaccgtcaaatggttctcgccagcgctgatttcgccttcctgacggttatccagctttgccgcatagagattgagcgcccggccggcgctgataaccccctgattaatcagccccagtccggagagattccactgcaggttgccgttggcgatgatcctcccggcgttatgaaacgcctgacgcaacgtgagcgacatatcgctctgagagagcacctcgccatcgccgctgagggaatcggcatcgaggctaagtttgctcgcggcaagtaacgtcccgcccgtattagccagcgccaggttgacgcctgctatttccagagcggcggcggagacgatctgcccctgtcggttatccagcctccggttgtggatggtgatattgagattaccgccggactgcagttctccctgccggttatcaacggtggcgctctgaatacccagggcatcaaaggcggtaattgtgccctgctgattatccagcaaaccgctcgtcgtcaggttgacgctgccccgctgcgccgtgcctacctgcccgtgacgattattaagattttcagcctgtagccggatgtcgccgctggcgatgatattcccctgcgagttattcaccccatggcgcgcagtgagctgaacgtcgccctgcgccgcgctgatttttccgccatggttggtcagattgtcggcgtcaagcttgatattgccatttgcggtaagcacgccttcgcggttatccagcccttcttcagcgctcatggccaggtcgccctgcgccgcaatcaattgcccctgctggttccgaaggctggccacttgtagagaaaggctgccgccagcaacgatattcccttgcgaattttccagctcgtgacgcgtagtgagctgagcattgccctgcgtcgtgctgattttaccgctgcgattattaatgttatcggagtgcaaaacgatattgccgttagcggcaatagtgccttcgccgttgtccagcgcgccttcgctggtaatagacatgccgccgctgccggtatgcagcagcgttccgttttgattgagcaactggctggtgctgagcgtcaaagcatggctgttgctggcaatctcaccgccgcggttatccaatcccgcacgaaaatcaaggcgtagatcgtcctcgcccgtctgctggattacgccctgttggttatccagcgccattgctttcagctcaagcttgctggccgtcaacaggccactgtggttgttgagtttgccgctggcggccaactggagtttttcgctggccgccaccaccgcatctcgggtggtgatatcgccggacgcggcgctgaccacgatccgcgcccccgaggttcgactgttatcaagatccaccgtcctgccctgcgccgtcagcattcctgccgccatattgcggccattcagcgccagcgagctctggctattcagcgtcagcgcgccgctgctggcggtagaaccatcgctatttaatccggcggcgagcgtactgttttgcgcgctacgcaaagcgttggcggcaatccgcgtatcgccttgcgcggcaatcatgccgtcattggttagcgtcgcgctggccgtcaccacgctatcttttccggcgtacagctggccctggttgtgaagatcgcccttaacggacagttgcagattctgcgcggactgaatcacgccgcggttgctgagcgcgccatccgcgctgattgctacgtcccccgccgccgcgccgatattgccggcattgtgaacgcctacgccgcgctcggtaccgacaagacgaattttatgggcgtacatcccgcccagcgcgctgacgtcgatcgccaccgcaggcagcgcactgccgtcggctgattttgccgtcgtccggctgtgcgccgcatcgatctgattacgccctgcggtgacctttagctcctgcgcccaaaccccggcgttgattttcaccgcgcgggcgagcaggtcggtgctgtctaccgagctcgcatcaaggccgccgccctgtacgagaatttcgccgcgattgacatcataaccgctaatctgcccgttaccgtactgtacctggcctgtcgtcagcgtcgcgcggttggcattgatgaacccgcagccgtcgcagctaattccggcagggttagcgataaccacctgcgctttttgtccggcaacctcgatatagccattcagccggctcggatcgcgggtattcacctcgttgaggatcactctggcttcccctttcgccagattcgggttcccggcgaccatcccggccagttgggttgaagtgttagcacggctgttattcagcaccacgccgcgcccatcgacgtcaaactggctgtaaacgttgcgtgaaacgcctgcgccgctcggtgtctgaatattgacctgcggcgtgccattggcgctcttggcgatctgcggttgctggccgcctggcgcatggttatcggcgacaatcgccgcctgagccgaggtaagacaggaaaaagcgagcagaaagctaaaggccagcggcgccagggaggagattaacgtcgacccggttcgcgcgtcggcgccggattgcggcgatacgccagcccgatgagagcgggtcgtttccgccaccaccatcagcatcccgcgagccttattaaatacgattcgataaaagcgtttattcattgccgttactcgtcatccgttgtccaccgcggcgcggaagatcgtccatgtgcgcagcacgcgccgccgggcggcgcgtgagtgaaagtcagtagctccagctgacgctgaaaccaaaagttgccggatcggttttaaagccatcgggtttggctaaagggataccggcgaacaggtcgtagctggcgcggtggtactggccgcgcagccctgccacgcccccggcgaggtgtttgcccaccagcgtttcactgcctgcgccgccgacttcgccgtaatccgcccccagataaaactcctgccccggcaacggagtcgaccaggcgatatcgttacgtacgtaccagccgtgactggcggtcagggtgcgctcgccgtcgaagccgcgtaccgtccagcgattgccgatggaaaacatatccggcgaagtcagcgtcgtgctgctcatctgccgctgatagcggctggtaaagcgaaaattttggccgcccagggcaaaaggcaaattgagctgagcattgaattgcaggattttgctgagggcggttgcttccccccattgctcttccggcgcgggctgagcgccaaaccagcgggtaccgcgctgatagctcactccggcatcgagagtggcgttgcccaggtaatggcgatgctgcagaccaagcttccaggccgccgtttgccgccgctgaacggcaatctcggtgtcgttaatgaagttgcgctgctcgcgggctaacacatcggcgctaagcgtggtcttctgactaccgctacggtgcagtacgcggctcatctggaaatcaacgttcttgcttttaccgctgtactggtaatcgccgttggcccccgccacggtttgcacgtaatcgtactggctggcggttaatccgaactgccagtaacccagcgggaccgaatagtgaccggtcaggttctttgaggatttaccgccgttgccatcgaggttatgtgagccggaaaggtaaaaaagatcgcttaaggctaacgggttatccagggacaacgtcaggttaccctgatagcggccggtggcattagagccggaatcatcgagcgaggcgtcaacgcgccagaagcgttcctgttggcggttaatgacaatatcgctttgcccaggcgtttcgcccggaacaatttccatgctggcctgtaccgtcggcagacgctgcaagttttccagcccctgctcaatatcgcgcaggtccagtagtttcccgtcggtcgccggaaacgcgctcgccagccatagataatcatcgctgtcctgcgtaagcctggcttcacggatataacccggcatcaccaccaggcgcaaaacaccgctttttaaatcctgctgcggggcaaggatccggctggtgatataaccgcgatcgattaatatattctgcaactgggccatcagtagattaatgcccttccctcccagacaacgcccaaccgctttatttgcctggcgctggagcggaagccaatgcggtaaggcatcggcgccctgtaaaataatctgtgaaatagcaaagcaaggttgttccacgggaaataaaccatcatcggtatttatttctcccactgataaatgaatatccggtgacggcggcgcgagctggttttccagcgcctgctggcgctgctgctggttgatgaactgctgctcacgtacggtatccacaggcgcagcccatgcccaggcaggcaatatacagataattaaaactttatgaatgaaagtccatttattcattataattaagtcacaacgttccatctcgagtaatagaaagcaaagcgtggcaattaatacaaccaaacccatgttaatatcaacatatattattcaagccacttcaaaaaatattacttaaaattataaacgcgttcattaccccagtttcatgatatggatgaatcaccgttaagttctgccgaagacaatatgaaatcatcatgaaataagtatatgagattatgaattaatatcgattcacactgagagcattagcgcgacctctttttacgttctgccgctcccccatcgcactgggttgaaatatgccgtgatctcaatcacataattatctcttgttcacttgatggccaaccgcttatttcagctagcgaccgcttaaccttccatacaaccactcaccgatttacccaactttacgcgcgcgctgttctggcaagatcggaggcagcctagctaatcaatacctccatcaacccttacttaaaaccagacggcttcggccaattattcatctaattaacgccaggttttactatggataccaaaaaactattcaagcacataccctgggtgattctcggaatcatcggggcattttgcctctcagtcgtcgcgttgcgccgcggtgagcacgtcagcgccctgtggatcgtcgtcgcgtcggtttccgtgtacctcgtcgcctaccgttattacagcctgtacatcgcgcagaaggtgatgaagcttgacccgacgcgctccacgccggcggtcattaataacgatggcctgaactatgtgccaaccaaccgctacgtgctgtttggccaccactttgccgcgatcgccggcgccggcccgctggttggcccggtactggccgcgcaaatgggttatctgccgggtaccctgtggctgctggccggcgtggtgctggcgggcgcggtacaggacttcatggtgctgtttatctcctcgcggcgtaacggcgcctcgctgggcgagatgattaaacaggagatggggccggttccgggctctatcgccctgttcggctgcttcctgattatgatcatcatcctcgcggtgctggcgctcatcgtggtgaaagcgctggcggaaagcccgtggggcgtgtttaccgtctgctcgacggtgcctatcgccctgtttatggggatctacatgcgcttcctgcgcccaggccgcgtcggtgaagtgtcggttatcggtatcgtgctgctggtggcctctatctggttcggcggcgtgattgcccacgacccgtactggggcccggcgctgacctttaaagacaccaccatcacctttaccctgattggctacgcgtttatttccgcgctgctgccggtatggctgattctggcgccgcgtgactatctggccaccttcctgaaaatcggcgtgatcgtcggcctggcgctggggatcgttatccttaacccggacctgaaaatgccggcggtgacccagtacattgatggtaccggtccgctgtggaaaggcgcgctgttcccgttcctgtttatcaccatcgcctgcggcgcggtctccggcttccacgcgctgatcgcctccggcaccacgccgaagctgctggccaacgaaaccgatgcccgctttatcggctacggcgcgatgctgatggaatcctttgttgcagtcatggcgctggttgcggcctcgattatcgaaccgggcctttatttcgcgatgaacaccccgccggcgggcctgggcatcgtcatgccgaacctgcatgaaatgggcggtgaaaacgcggcgatgatcgcagcgcagttgaaagaagtcaccgtccacgcggcggcgaccgtcagctcctggggctttgtgatttcacctgagcagatcctgcagacggcgaaagatatcggcgaaccttcggtactgaaccgcgctggcggcgcgccgacgctggccgtcggtatcgcccacgtattccataaaatcatcccgatggcggatatgggcttctggtaccacttcggtatcctgtttgaagcgctgtttatcctcaccgcgctggatgcgggtacccgcgcaggccgctttatgctgcaggatctgttgggtaacttcgtgccgttcctgaaaaaaaccgactcgctggtcgccgggattatcggtaccgccggctgcgtcgggctgtggggctacctgctgtatcagggcgtggtcgacccgctgggcggcgtgaagagcctgtggccgctgttcgggatctctaaccagatgctggccgccgtggcgctggtgcttggcaccgtggtgctggtcaagatgcagcgcaccaaatatatctgggtcaccgttatcccggcggcatggctgctgctgtgcaccacctgggcgctgggcctgaagctgttcagcagcaacccgcagatggaaggcttcttctttatggctcagcagtataaagagaagattgccgccggcggcgagctgaccgcgcagcagatcgccaacatgaaccatatcgtggtcaacaactacaccaacgccggcctgagtattctgttcctggtggtggtgtatagcatcatcttctacggcatcaaaacctggctcaatgtccgcaacaataaggtgcgtaccgacaaagagactccgtatgtgccggtaccggaaggcggcgtgaagacctcgtcacatcattaaccctgatgccggatagcgctacgcgtatccggcctaccaaaagcgcattaacgtaggccggatatggcgctagccgccatccggctttattcgttatctggaacttataatgtttggtaacttaggtcaggcaaaaaaatatctcggtcaggcggcaaaaatgctgattggcattccggattacgacaactacgtcacgcatatgcaaaccaaccatccggatcagccgtacatgacttatgaagaattcttccgcgaacgccagcaggcccgctacggcggcgacggcaaaggcggcgtacgctgctgttaatggaggcaataatggcaccgattgcagtcaccctactcaccggttttctcggcgcaggaaaaaccaccctcctgcgccatatcctcaatgagcagcacggtttcaaaatcgccgtaattgaaaacgaattcggcgaagtcgccgttgacgatcagctcatcggcgaccgcgccacgcagattaaaaccctgaccaacggctgtatctgctgtacacgctccaacgaactggaagacgccctgctcgatctcctcgacagtcgcgatcgcggcgaaatcgagtttgaccggctggtgattgaatgcaccggcatggccgacccggggccgattatccagacctttttctcccatcaggtgctctgcgagcgctatctgctggacggcgtgatcgccctggtggacgccgtccatgccgaccagcagatggatcagttcaccatcgcccagtcgcaggtcggctacgcggaccggatcctgttaaccaaaaccgacgtcgccggcgacaccgaaaagctgcgtgaacggctggcgcgcattaacgcgcgggcgccgatttataccgtcattcacggcgatatcgatttaagccagttgtttaacaccagcggttttatgctggaagagaaggttgtcagcgccacaccgcgctttcattttgtggcagaaaaacagaatgacgtctcgtcgattgtggtcgagctcgactatccggtggatatcagtgaagtttcacgggtaatggaaaatctgctgctctccttcgccgagcaattgatgcgttataaaggcatgctgtggatcgacggcgagccaaatcgcctgctgttccagggcgtgcagcgcctctacagcgccgactgggatcgcccgtggggcgatgaaacgccgcacagcacgctggtgtttatcggcattcagttgccggaagaggaaattcgcgcggcgtttgccgggttacgacgctaacctgcccgcctgcgccctaaggcgcaggcccccttctctctgagacctcgtcaaaaacagggaccaaacgtcggcagcgcgtcgaaaaatgtaaagcaacgttttaataagtaacagtagaaacatttttggaaattataagaaactgaatgaataggccccttaataattaatgactgctctgttcagtttctgtttagcccaccaattaaaccacggctaaacaggctaaatttgctgattgacctcgccgtaacccaacgtcattacaacattttcaaaacaccttcctgacaaaactagcataaaaaatcgacgcaagtcacatttgcagaggtaaacatcgcttgttaaggtgccctcagacaactttattgacgaggagtaaaccatgagaaagcttaacatccttattcttgcagccctgaccgcggtctctggttccgccatggcggtggggtttaccgttgaacagggtaaaaacttcactaatctgaatatggaaatgggtaaatcctcttctggcctgtacgccgaaagccactggctgaagaataccgatgatggtagccagaccggcggcgtgggcgcgggttacaacctggaagtgggcccggtgatgctcaacgccggcgcgaaagccatctacctcgggccgaaaaaaggcgataacggcgtcgcgtttccggtcggcggcggagtgaacgtggccctgaccgacagcatccacgtgtttggcgaagggtatgtcgcgccggatggtctgaacaacagcgtgaaaaactatgttgaagcgaacggcggcgtgagctggtctccgattggtccagtgacgttgaaagtgggttaccgccatgtgagcgttgacggtaaagagggtcgcccgaaccacaccctgattgatggcgcctatgtgggcggcggggtcaccttctgattatggtcaacgccccgcgataaagttaaggtgcgctgagcattagccataaaaaaacctgccgaatggcaggtttttttatggccgggtcataggcttagcggcgcaccaccaccagcttctggttcacaaactctttgatgccgagatcggagagctcccgtccgtaaccggaacgcttcacgccgccaaacggcagctccggcgcggtatcggtgagccagttgatataaaccattccggtttcaatggcggaggccatccgtttggcgcgttcgatatcctgactgaacaccgcgccgcccagaccatagtgggaatcattggccagctggattgcctcctcatcgtttttcaccacgtagatctgcgccaccgggccaaagaactcttcgaagtacgccggattatcacgggtgataccggtcaaaatggtgggttcaaagaaattgccttctcgagccaccgctttgccgcccagatgcagcttagcgccatttttcaccgcctcgtccacctgtttgcttagggtatccagcgcatctttggaagagagcggccccagcgtggtgctttcatccagcggatcgccgattttcacctggcgaaacgcctcgctaaattttgtcaggaacgcatccgcgatattttcgtgcaggataaagcgcttggcagcggtacacacctggccggcgttgttcagccgcgcctggacgccgattttcaccgcgcgctccaggtcggcatcgtccagcacgacaaacacatcattgccgcccagttccagcgttgatttcttaatatgcttcgccgcctgcgccgccaccacgctgccggctttctccgaccccgttagcgccgcgccctgcacgcgatcgtcagcgataatcttcgccacctgatcctggtagataaacaggttggtccacgccccctccggagcgccggcctcacgcaccagatgggcaaaggtctccgcgcagtgcggcacaatgctggcgtgtttggcgataaccgggttaccggccgccaggtttggcgccaggacgcgcatcagttggtaataggggaagttccacggctccaccgccagtaagacgccaatgggatggtgctcaacccaggcttcacccaggtcggagggatacttcaccggcgccaggaacgatttggcgttatcggcgtaatagcgggcgatctgcgcgcaaagtttcacttcgccgcggctctgcttaatgagtttccccatctcctggctagcgatttttgccagctcctccgcccggctatcgatcagatccgccagcttatgcagtaccgccagccgcggttcaatatcgccttttgcccaggcagaatggtagagcgcatccgcctgctgcagcgccgcctccacatccgcatcgctgtgcgccgggtacgttttaataagctgattgttcgcaggattcaccgtctgataggccatatcgcatgtctccttgttatcgctactaaggcagtcaaaaatgccgttaaagatattaagggtagtcgagatggctggcgatgcgggtaaagttaggtatatccggaatattccataacgaggctaaccggggcgaccgtcaggccgccccggcgttatcaatgcgccagcgcggcgatctcgtcggcggtcaggccggtgattttcaccaccgtctcgcgggcaatgccgtcagccagcatcctctgggcaatgcgcagcgcctcggcatgctgtccttcttgtctgccttcttgtctgccttcaagccggccttcccgtttgccttttctgcggcccacttcctgtaatctttcagcaatagtcatcaatctctccctgtgctgaggaacccgttgcgccacttcgtggataaaccggccaaagcggcgcgcgttgccagtctgcagcagataattaaacagcgtttttagctgtctgtcattagcgtccccgctaagtaaaatcgtcgtcagttgctcaacaatgcccattaaatcgcgctggcgaatatgcttctgtatcagctcgagtaatgccacgcgccggtggcgaacgatctcatcgtcggggatcaccgtgacatccaccagcggaaagggcgagatataaagctcactcgccagctgtggatcggcaaaacagtccagccagttgagtgaccacgggtatggcgtggtcgctccgtgatagaacagcatcggcaccaccagcggcagttttgtatgaccgccatcaagatggcgctgcatcgcggcgatggcgtagcgcatcaggcggaaggccatctgcgcatccggcgagctctgatgttcgataaccacataaatgtagccctcgccagacgcggttttgagtgaccacagcacatcggagtaccaggcccgcaggctctcctcgataaagcttgccgactccagctgtaaggtatcgaggtcgcagcgctgacgcagcgcaggcggtagatggatcgccagaaaatcgcgcgcggtgtcggcctgagtgaggaactgtttaaacaccgcatcatgcggcgtcgaggtggtgccctttgccatcggctcatccctgcctgcttatcctgcagggactctacatcccatgaatgtctctggcaccccggaaaccgggattttacattccgctacgaaaacatatttccccggactgcaagcgtgacatcctttttcgacgcggtacgcaaatccaggcgggcgacagcctcggcgcagcatgctataaacggcttatccccgcagcaaaggccaaagcagtgaaccatacccgagatatcccccaaaccttctggcgagacgatcgtctgccgtggctggagctgcgcagcacccggcgcagccgccgggcctataagcgccacagccacccccagctttccgtaggggcgattatcgagggggaaacgcgctgcctgtgcgctggccaggagtacctgctacagcccggggatctgatcgtgatcccgccgcacgcgccgcatagctgtaatccgctgcatggcaggccgcgcagctatcacatgctttacctggacgcgacatggtgccacgcgcagcgcccggatattccccctggcgccagtatcacctcgccgcagccgctgctgcgcgacagccctctctttgccagtttccagcaggttgtcgccctgatgagccgcgggagccttgaacaactgcccgcccggctggcgcaactcctgcacgcgctgccgctgtgcgccgccgcgccgcaggcgccacatcacgccagcgccctgctgtttcagcgcctggcgatggatctgccggcgtcgccgtcgctggataagctggcccacgacagcgcgcttcgtaaagagaccgttatccgcgccgtgaaacaagataccggcctgacgcctgccagtttgatcaacatggcgcgcatcgaatatgcgaaaacgcgcttacgcgccggggatcctatcgccgacgttggctatcaggctggctttgccgatcagagccatttccataaaacctttgtcagctataccgccgccacgccgcggcagtatgcgcaaagcagatcaatatctgacaataagtaatacgccacctggcgtagggtggcctctgcaccattatcgaggccactatgcataccttatcgacgctctttcccgccgtcttcccggcgctagccctgtcccactttgtcgctctgctcagtccgggccctgatttttttctgctgatcggctacgccgtgcgctaccggatccgcggcagcatcggattgtgtctcggcatcgccgcaggcaatgcgctgtatattgtgctcgccatcgtcggctgggggcttctgcgccaggcgccgctgctttttttgctcatcgagctgctgggggcgggctatttattgtggattggcagcctgctgatacgcagccgtcccgcgacgctggcgatggagagcgttcgcgcagcgcgtccggggttcggcaggcagctgctgctggggctggggtcatcgctgctcaaccccaaaaacgccctgttttatctggcgctgatgacttccctgctcgggccggctgtgaccctgcttcagcaaacggtgagcgggctgtggatggtcagcgtggtgttcttctgggatttactgctggtgagcgcgattgcgctgccgcagatacagcgccgcctgggcgccatcgtctggcgagtcgagcgggcggcgggggcgatcctgatgctcttcggcctggggattatctggcgatttttgcacgacctcgccgtcaggctatatgcttaagcatatggaaaaactcgctgaactgaaacgcgccaaactgctggcgctgtcgctgctgctgattgcagccgccatttttatcactaccctcgcgctaccaccgtcgccctgggtcggtgcgctaaaagctatttccgaagcggcgatggtcggggcgctggccgactggtttgcggtcgtggctctgtttcgccgtattccgctgccctttgtcgcccgccatacggcgattattccgcgcaataaagaccgcatcgccgacaacctcggccgctttgtcgaggaaaagttccttgataccccgtcgctggtcgcgctgatccgccgctatcagccagccctgatgctcggcaactggttcagccagccggagaacgcccgacgggtcggccagcacctgctgcaggtgatgagcggttttctcgaactgaccgatgacgcgcgcattcaacgtctgctgcgacgcgcggtgcataaggctatcgataaggtcgacctgacgcagaccagcgccatgatgctggagggactgacccgcgacaatcgccatcaaaagctgctcgattcgctgatgaaccaactgatcgccctgctgcagcgcgacagctcccgcgcctttatcgcccgcggcatcgtacactggctggagaccgaacacccgctgaaggccaaactcctacccaccgagtggctcggcgagcacagcgctgagatggtcaccgacgcggtgaataccctgctggacgaggtgactcacgaccgtacgcatcagatccgtcagacttttgaccgcgccgtgcaaaagcttatcgataacctgaaatccgacccggatatggcgcagaaggccgataacatcaaagcctggctaaaaaatgatgagacctttaaccactatcttggcgaagtatggggcgacctgcgcggctgggtaaaaaacgatatcagcagcgacgactcacgtattaagcagcgcatcgccgaggcggggcagtggttcggtgaaaccttactccgcgacgacgcgctgcgcgaatcgcttaacgaacacctggagcaggcggcgcaccgggtggcgccggagttcgccgccttcctcacccgccatatcagcgacacagtgaagagctgggacgcccgcgatatgtcgcggcagatcgagctcaatatcggtaaagatctgcagttcatccgcatcaacggtaccctggtggggggaaccatcggcctgttgttgtggctgctctcgcagatcccctcgctgctgcatctgcatattggttagcaatgatactatccgaacaatagcgctgataaatattccacagggagggcgaaatgatgcacaggatttcccactggctgagccgacacgccgccgcgctgttcttcccggcggcgttaattctgtatgatttttccgcttatctcactaccgatctgatccagccggggatcctgcacgtggtgcgggatttcaatgctgatgtggcgctggctccggcctcggtgagtctgtatatggccggcggcatggcgctacagtggctgctggggccgctctctgaccggataggacggcgtccggtgctgctcaccggcgcgctgattttcaccctcgcatgcctggcgaccctgttcaccacctccatgacgcagttcctgattgcccgcttcgtgcagggcaccagcatctgctttatcgccaccgtcggctacgtcaccgtacaggaggcctttgaggaaaaaagatcgatcagactgatggcggtgatcacctccgtcgtgctggtggcgccgatcgtcggcccgctctccggcgcggcgctgatgcatttcattcactggaaagcgctgttcggcattatcgccgccatgggattggtggcctggctcggcctgctgttgaccatgccggagacggtgcgccgcggcgatgtgccgttcagccccctgggcgtgctgcgcgattttcgcaacgtctttcgcaaccgcatctttttactcggcgccgccacgctgtcgctgagctatattccgctgatgagctgggtggcggtatcgccagtgattttaatggacgccggcggactgaccaccagcgagttcgcctggagccaggtgccggtcttcagcgccgttatcatcgccaacctgtcggtggcgcgctgggtaaaagaccctacccgcccgcgctttgtcctcagcgcggtgccggtacagatgctcggcctggccatcctgatcgttggcaatctggtatggccccacgtctggctgtggtcggtgctcggcacctgcttctacgccttcggcatcgggctgattttcccgacgctgtttcgctttaccctcttttccaacgacctgccgaaaggcacggtctccgcctcgctgaatatcgtgatcctcagcgtcagcgcgttatcaattgaaggcgcgcgctggctgtggttccatggcggcagactccccttccacctgttggcggtggccgccgggattgtcgccgcctgctgcctggccggactgttacgccaccagcgcggacaagcggtgatcgaagcccggcagtcgtgagcccttttacggagaaagccccatcatgaatgacattgaactcagccaggcgcagcgcgacctgctgcgcgacaagctcagcaagtactgcgcagagaccttcgacctcgaactggagcagtttgacgccgaatttttcgtcgactttatcgccaaagagctggggccgctgttttacaacgccggtatcgaagaggccatccgcacccatcaggcgtggagcgagcgtatccaggaagagatggatttgaaaaaggtctattaacaccgcgtacagacgcaggagatcaataaaaccctgcatacaccatggctataatggcgactctttcagcatctcccgtgtacggggaaggaaaaccatgtcgcttatcaccgatctacccgccatttttgaccagttctcagaagctcgccagaagggctttctcaccgtcatggatcttaaagagcagaacgtaccgctggtgggcacttactgcacctttatgccccaggagatcgccatggcggcgggcgccgttgtcgtctcgctgtgctcaacctccgatgaaaccatcgaggaagcggaaaaagatctcccgcgcaacctctgcccgcttatcaaaagcagctacggcttcggcaaaaccgataaatgtccctacttctatttctctgacctggtggttggggaaaccacctgcgacggcaaaaagaaaatgtatgagtacatggccgagttcaaggcggtccacgtcatgcagttgccgaacagcgccagcgatgccgcctcgcgcgcactgtggaaaacggagatcctgcgcctgcagcaggtgattgaggcccggtttggcacgccgattagcgaggcggcgctgcgcgaagccatcgtgttgaaaaatcgcgagcgccgggcgctggcccacttttatcgtctcgggcagctcaatccgccggcgctcagcggcggcgacatcctgaaagtggtgtacggcgccacttttcgtttcgacaaaaccgccctgattgatgaactgcatgccatggcggagcgcatccatcaggagtggcagcagggtaaacggctggaacctcgtccgcggatcctgatcaccggctgcccgatcggcggcgcggcggaaaaagtggtccgcgccatcgaggaaaacggcggctgggtggtcggctatgagaactgcaccggcgcgaaagcgaccgagcgctgcgtggcggaagagggcgacgtctacgacgccttaaccgataaatatctcgccatcggctgctcctgtatctcccccaacgaccagcgtctgcagctgctgagccagatggtggaggagtatcaggccgacggggtgatcgacgtcattttgcaggcctgccatacctatgccgtggaatcgctggcgattaaacgccatctgcgccaacggcacgatcttccttacatggcgattgaaaccgactattcgacagcggacctcggccagctcagcacccgcgtcgcggcctttatcgaaatgctgtaaggagctggcgtgaactatacggttggcattgattccggctccaccgccacaaaaggcatcctactggcggacggcgtcatcgtgcgccgcttcctctgccccaccccctttcgccccgccgacgccatccacgaggcctgggagacactgcgcgctggcctcacggagacgccttttttaaccctcaccggctatggccgccagctggtggattttgccgataagcaggtgacggagatctcttgtcacggcctcggcgcccgcctgctggcgccggacacccgcacggtgattgatatcggcggccaggacagcaaagttatccagctggacgccgggggaaacctcagcgacttcctgatgaatgacaaatgcgccgccggcaccggccgctttctggaagtcatttcacgcaccctcggcgccagcgtcgaacaactggacgccattaccgacggcgtggaaccgcacgccattaccagtatgtgcacggtgtttgccgaatcggaggtcattagcctgcggtcggccggtgtcgcgccggaggcgattctggcgggggtgattaacgccatggcccggcgcagcgcgaactttatcggccgcttatcggcgcaggggccgctgctgtttaccggcggcgtcagccactgcgccgcctttgcccggatgctggaaagccatgtcggcatggcggtgacaacccatcccgacgcccagtttgccggggcgatcggcgcggcgctgatcggccagcgccagcggaggcgcggatgacaacgtttctgtttttatttcactccacggtgggggtggttcggatgcgcaaagccatgcaggcggcgggagtagccttcgaggtcaaagatataccccgccagctgcgcagcggctgcgggctgtgcatcctgctggaggggacggaagccgatgcgcgaggctggatcgtcccggaacagacggcggcgctgtatcagcagaacggggaagcatggcgctgtctcgccaccttcccacctgcagattaatcgctcaccacaaagcgcgtcgccgcgaaacagttcagcaggcggtgcatgagaaaaaccagggtcagcgtcaccaccagcgagaccgtcaccgaggtgatgcggtacagatcgctgaacaccagatcctgatacggatgcaggttctggccgaacataatgccgatggtagtgatgctggcgaagcccaccccggcgcccactttctccatcacgtggaggcgggcgctgaaggccagcccgagaccaatcagcggcatcatcaggatcatgtggttgctgaaatcatagataatcagctgcaccaccagtatatagagacaggccagcaccaccccgacgacgcgccagatcgagctgatcaccgccccacgatagtgcatcgggaacaggatcaggatcccggccatcagcgccgacagcgagtcgctgagatcgcagatctgaaacaccacaaagatgatcgtcgctaccgtaccggagagcagcgactcatgacggatgcgggcggcgtctttctcaatccgcggcggcggcttgcgcggttcgacgtccgggatcaggtaatgcagcagcgcgctcagcgccacggccatcacgcaggcttccatattggagaacatcagggtgtgccagttgctggtgggatagctcataaagttgagcatcgtgctctggcacaccacccccatcgatcccaacaggaacagcggtccctggctcataaagcggaaacgcatcacgtacagggcaaacaccaccagggtcatgatcaccggccactgcgacaaatagccgacaattagcaccatttcgacacagtttaccgccgcgctaaatataaactggcgggcgacgtgcaggttgaacatcggtaccagcgacatcagcatcagcggataaacgacgaaaaatacgccgtactgtacgtcgtagaaggtggagatgctgagcgcaatggtcccggccacggcgatacgcaccgtctggcgaaaatcattcgccgtgtagacgatattgccgtgcggcgtaaagacgtgcgccagggtattaatagacatagtgcaaccagctcaccaggtggatctgcaggccggcgaaggtgcgggcgaaaggtccctcgctattgtacagctgcaccgtggcgcgagcgccggtcggcagcggtttgtccagcggctgatccagcgcgacgtgaatgcgcatccgctgggcgtcgcgcacccagcgggtggactgctcgggctgcgacagctggccgttcaccgcctcctgtcccgccagaatcccggcgtcgctgctggtcacgtgcgccgggaagacttgacccggcagggcgtcaaagaccaccgccgcatcggtattcaccgcggtgtggcgcaggcttttttcgcggaagtcggcgacgatgtcagtgttgttgttaaccaatgccagcacagccgtcgccgcggtggcgtagatccccgggttcagctgcaggttgctgaccatgccgtcagtttccgcacgcactttggtccaggccaggttcagctgcgcctcctccagcgcattgcggtatttttgcagggtgacgttgcgcttatcgtcgcgctcgccgcgctggatcagcaggttctggatctgcgcgttcagcgccgagaccgactgctcgctggtctgccaggtggttcgcaccttatcgaggtcggactgcgagacgttctgcatcgtactcaagcgctggtagcgatcgagcgtgaccttatcgttacgcgcggtgtactgcgcggtgcgcaggttggcgcgggcggcggcgatttgcgcgtccagctgctggttgctcagtttcgcctgctcgagggcgatctgcgccgcttcaactttattaatgaatggcgttgggtcgagctcatacagcaggtcgccctttttcacctggctgttgttgtgcacgtagacgtgcgagacatagccggagacccgcgacgaaaccggggtcaccacgcgcatgacggtggagtccggcgtcagcgggatccagatatcggcaacgataaaccaggcgaatattcccagaaaagcggcaatactcacccgtacccagcgggcaaatttttgttcaggcgtcatcatagtgtgttagatcttgttatcttcttcgcggatattccgcaaacggcaggcgatttgatttaacgtggcgctgaaggtggcgagatcggcctccgggatggtctgggttacgcgctcctgataggtctcgatcacgcagctcagtttttccagaatagcccgcccctcagcggtcagcgtcagcaggcgaatgcgtttgtcatatggcgatgtggaacgcatcagatagccctgcttttccagtaatgagagggtgcgcattagcggcggcagttcaatgccctgcacctccgccagttcgctgaccgagacgttgtctcccagctgatgcagttgcatcagcaccgtccagctggactgggtgagtccggtatcggtgatagcggagtcaataatggcgcgccactggcgcaccaccatagccatccgcatccccagcgggcggcgggcaaacagttcgtcttcagtcacgggtcttcctctcattattgagaagaaaataatacttatcagggtaagtatcaagaaacggaagctcgtgccgcatcaattgataaatttcgtgaatgtatcccggcggcactttgcgctcaccgggataatgaagaaggtttgcctgtaaaaaactgcacgttttaattgatctggtcccgacgcaggccgatatctttcagctgttcgtcgctcatttgctgcaaaactctgcgcgtttgctgctgaagccaccattttttgataaaccgcaccagcaatacgaaaccgataaatggctgtcttgccctgttctcgtgaaattccatcctctacctcctcaccttgccagaggctttatcttcacggatttgggggtaaggaatacagattcacaaaacgcttttctttaacatacagattagctaaaacgtacaccagagcccaatttttacgcccatctgtactggttattccatctgtatggcggcaattaaggatacagcatgacccgctaccaacatctcgctacgctgctggccgaacgcatcgaacagggcctgtatcgccatggcgaaaagctgccgtcggtgcgcagcctgagccaggagcacggcgtcagcatcagcaccgtccagcaggcctatcagctgcttgagcagcagcaaatgattgtgccgcagccgcgatcgggctatttcgtcgccccgcgcaaagcccagccgccggtgccgccgatgtcgcgtccggtccagcgcccggtggagatcacccagtgggatcaggtgctgaccatgcttgacgcccgctacgataaatcgatcatccccttcggcggcggctcgccggacgtgacgcagccaagcctgaagcccatctggcgtgaactgagccgggctatccagcacaacctcactgaggtgttgaactatgacgaactggccgggcgtcgcgagctacgggagcagatcgcccgcctgatgctcgacggcggatcggtggtaactgccgacgatctggtgctcaccagcggctgccacagcgcgctgtcgctggccctgctgtcggtgtgccagccaggggacatcatcgccgtggaatccccctgctactacggcaccatgcagatgctgcgcgggctgggattaaagacgattgagatccccaccgatccggaaaccgggatcagcatcgaggccctggagctggcgctggatcagtggccgatcaaaggggtgatcctcgtgccaaactgcaataacccgctgggctttatcatgccggacgcccgcaagcgcgcggtgctgaaccttgcccaacgctacgatatcgttattttcgaggatgatatttacggcgagctggccaccgaatacccgcgcccgcgcacgatccactcctgggatatcgacggccgggtgatgctctgcagctcctttaccaaaaccatcgcccccgggctgcgtatcggctggatcgcccccgggcgctactacgacaagctgctacagatgaagtacgccgccagcgggaccaacgtcccctccactcagctggcggcctgcaattttattcgcgaaggccactaccaccgccacgtgcggcggatgcggcagatctatcagcgcaatatcgagatctacacctgctggctgcgggaatttttcccctgcgggatctgcgtcacccggccgaagggcggttttatgctgtgggttgagctcccggagcaggtagatatggtctgcgtcgccaagcagctgtgccggctgaagatccaggtcgcgccgggctcgctgttttcggcagcgggcaagtatcgcaactgcgtcaggatcaactgcgccctgccgccgaccgaaaaacataaagcggtgatggtgaagctgggagaagcggtgaaggtggcgatggagtgaatttaacctgttctccccggtggcgctgcgcttaccggggctacgggtgatctaacgtctgcgtagcagcttcactgatcaaaaaacaccattcccttatacggctgctcgcggcaggcggccagacgctgggcgagactgccgacgtgcagctccagcttatggccatcgggatcgaggaaatagtgcgaggcaccttcgctacggttcagcttccagatcgccacgccggcagcctcaaggcgggcggcgaagctagcaaaatcggcttcgctaatactaaacgcataatgggtgtagtcgctctcttccggcggagtaacgcgccgctgcggatccagcgacaggcacagccacaaatcgccgcaggagagataagccccgctgtcccagcgggcatgcagcgtcatgcccagctgctgctgataaaacgccacgctcggcgccagctggctgactgccagggtcagatgattcagtccactcagcatgtctgttcctctagtgaattcacaatgaactgacgcagccattgatgcgccgggtcgcggtgccagcgctcgtgccacagcatcagcatctcaaagccggcgaccgccagcggcggctcgacgaccaccagcccgctctgcccgcgcaccagccgctccggcaggaccgccaccagatcgctattgcgcagggtctccagcataaacaggaaatgtggcacggaaaggacaacccgccgcatcagtccgaggttcgccagcgcgatatcggtcgccgcgctgaagccgcccccgtccggggagacgatcacgtgctccagctgacagaacgtttccaggctaagcccaggccgcagcgctggatgttccgcccggccagccagcacgtagcgttcgcgaaacagcaggcgctgatgcagccccggcggcgcgccctcgcgggtatgaaagaaaagatctactgtatcgctggccgcctgctgctccagccgcgccggctgcagttcgactaccgccagccgactgccgggagaggcctggcgtaacccagccagcatcggcaggaggatcgccgaggccatatagtccgtcgccgccacccgccaggtctccgccgccgtggccggatcaaaagggctgaccggcgccaccgcctgctccagcgcggctaacgcagcgcgcaacggctgacgaagctcatcggcgcgggcggtgggctgcatgccgcgcgggcccggcatcagtagcggatcggcgaaaatctcccgcagcctggcgagctgaatactcaccgagggctgcgacagattcagccgctgcgccgcccgggtaacgttgttttcgctaagcagcacatccagggtgcgcaacagattgagatccagacgctgtaaattaatcacgactataccgggaatttaagtaattaatttctactatagcgtcagctttcctactctgcagctctccatacgccagaggtgatattatgaaagtactgctgatttacgcccatccggaaccgcgctcgctcaatggcgcgctgaaaaatttcgccatccgccatctgcagcaggccgggcatgaagtgcaggtttccgatctctatgccatgcgctggaaggccgggtatgacgccgacgacagcggcgcgccgccggtcggcgagttctggcggccgaccctcgattccaaacaggccttttcccagggcacccaaagtgcggatatcgtagccgagcaggaaaagctgctgtgggccgatacagtgatttttcagttcccgctatggtggttctcgatgcccgccatcatgaagggctggatcgaccgggtgtacgcctggggctttgcctatggcgtcggcgagcacagcgaccgccactggggcgatcgctacggggaaggcactttcgtcggcaaacgggcgatgctgatcgtcaccgccggcggctgggcagaacactattcaccgcgcgggatcaatggccccatcgacgacatcctgttccccattcagcacggtatgctgttctatcccggctttgaggtgcttccgccgctggtgttctaccgcacggataaaaccgatgccgggcagttcgccgatcagtgcgccgccctggccgagcggctggacacgctgtggcaaaccgagcccattccattccgccggcagaatcatggcgattatctgatcccgtcgctgacgctgcgcccggagctggcgccagggcaaagcggcctggcggtgcatttgcgtagcgaataactggctatcccgtcttcgcccccgaggacgggtcatttacccggctctctccagtcccagcatgcctcgcgcctggataaagcacagcagcaatacgccccacagcgccatcgtcagataggggctgataccgaggatattgaacccactctcaataatctgcagcaggaacagcgcgagcaccatcccaacgatgcgcccgctaccgccatccggattcacgccgccaagcaccgccgcgaggatcgacaccagcaaatacgattccccataagatgctttggctgagttcagcttcgacatcatcagaaacgcagccaccgcgcagagcagggccgagatgacatatacccacatcaacacccgccgggtattgatcccggaataatgggtcgcccgttcgttggatccgatcaacatgatcgcccgacccagcgggcttttctccagcagcacccacagcccggccgccaccaccgcaaaaagccacattggcagcggaataccgaaccactgggcgtgattcagccacagcacccactgcggatagttagcgatggcgctgccgccggtgatcagaatatttatccctttgagcagggtcatcatgccaagggtagccaggatcggcgaaacgcggatcccggcgatcaatatcccgttgcacaggccaatgatcatcgccgcccctccgccggccagcagcgtcgccagcgcggtagcgcccccaggcggatagctcgtcgccacccaggccatcaccagcgagcaggcgttagccgtcgcgataattgacaaattaatgccgccgcaaagcatagtcatggccatcgccagcgccaggatccccagcaccggcatttgcgaggcaatcgactggaaattgctgacagaccagaagatgtttggcatggcgatgctaaaggcgataaccatcagcagcagcaggccgatcaggtaaaactcaacgttgttgcgccacgattttttcataacaagctccggttctgatgctggctccatgccgttacgctgatgctgacgacgatgatcgccccagtgatcagggtctgccagtaggaggagacccctagcaggttcaggccattctgcatcaccgccagtaaaatcacccccagcagcgtaccggtgagagttccgcgcccgccaatcaggctggtgccgcccagcaccaccgccgccagcaccgtcagctcatagcccagcagtgaatccggcgcaacggtcatcactgtccacgcctgcacgacacctgcggcccccgacattagccccatatagccataaacgaacagctgcaggcggagcacgctgaagccgacgcggctggcggattcccggttgccgcccatggcatagatcttgcggccaacggtggtgaaattcatgataaacgcggtcaacagcaccacggcgatcatcgtcagcagcggcagccccagaccgtaatcgtaaccatcggcatcggtatatttgaacagcataacccccttttcaaaccacggagggaagtcgtagagccagacacctttgcttaaccacagcagcaaaccgtagaaaatgttgagcgtagaaatggtgataatgatcgaggggacccgcagacgattaaccaacagcgcgttcaccagccccagcagcacgccgatgccgccggcaagcacaaaagccaccgcgaagttgccgcctactttttgcagcatcaccaccatgccgtactgggcgataatggtcatagccgggaaggagatatcaatcccgccggcgatcagcaccacgaacagaccacaggcgagaatggtcagcatcgcatagttattagcgaggtcgtaaagattgccgaaagtgaaaaattcctcactgcgccagcccagcagcaggcacagcgcagtaatgaacatgcctaaccagaattcatgtcgtttcaacagattagccattgaccacctccgctatctgctgctgggtactgctgtccggcaggaagctatgggtcaactcgccctgcttcatcaccaggatgcgatgactctggtaccacgcctcttcaatctcgtcgcaaatcatcagcacggcgataccatgggcagccaaatcgctgatgatatgatagatcccggctttgtttgcgatatccacccccacggttgggctatcgaggatcagcagcttaggagagatcgccagccatttggcgatagaaacgcgctgggcattaccaccggagagggtattcaccggcagatgcgtatccggcgccttaatggtcaacgcgttgaccattcttgcgaccagctgctgagctttactatcactcaatagtccgcaagcgcctttcactttatgaaacacggtgctgataatgttgttttcaatcgactgactcatcaccaggccgcgcgacatacggtcctcggagacatagccgataccgtggcggatagcgtcctgattgctacgcaaccgcaccggctggccatttatcaggatctcgccgctgtcagggcaggtcatgccgaaaaggctcaggcacagctctgttcgcccggcgcccaacaggccgactatcgacaccacttctccggcttcgaccttcagggagacgttatgatattcccccttgcggctgagattgcgcacctccagcaccggcgtactgccctgcccctgccacagatcgcgcacctgaaagtcaaactcctggcccgtcatcagaaaaccgagccggcgggtggttacctctgccgccggcaaggtgccgaccagattgccatccttcagcacgctgatgcggtccgatacggccatgacctcttccagacggtggcttacgaagacgatgcagatccccctctcacgcagctggcgcaccacatgcaataatccctccacttcctgatgggtcaatgaggccgtgggttcatccataatgataagccgggcatcctgcgccagcgcgcggcagatagccaccagttgacagcgagcgatggagagcgattccacggcggcatccagcggcagcgagacgttaatactgcgcatcgcctgctccgcactgcgtcgcagttcgctgcgcctcaccagcacgccgcgatgatagtggtttatagcaatgttctcccacacgctgagattgggaaacagcgacagatcctgataaatcacctggatcccatgggcgacagaggccgctggcgtcagtttgggccacgtcttgccgcccagcgtcatcgctgcgccctcatccgggcgatagacgccagagataattttgatcaacgtcgacttcccgcaaccgttctgcccggccaggcagtgcacttctccgggcataaagtcgatgctgatatcattgagcgcgcggttggcgtggaaggttttgctgacgtgtcgaagggaaaggaaaggttccatagcatcccctggctggttaagccggggcggctggcgccccggaaggtggattagtagagcgaatcaatattgtctttatttaccagcagcactttatggaagcggataatatgcttgtcgctatcgacctccgctttaccgagctctttcagttcaaatcccggctcaatggttttgccgttcagcagggtgctggcgacggccgcgagggcatagccggctgtcgccggatcgtaggtgatcccttcggtaatatcgccgctcttaataagagaggccgcctgcgaggggatcatcatcccgtagaccgcgactttatttttcgcacgcttctctttcaccgcgcgccccgcgccaatcgggccattcgaaccaaaagagaccaccgctttcagatccgggtaagttttcatcagatcgagcgtggtacggcgggaatcatcaacactttccgccaccggcattcggcgggtgacttcatgcatgtccgggtaatgttctttttggtatttcaccagcagatcggcccacaggttgtgctgcggtaccgtaaggctaccgacatagataacgtagccgcctttgccacccatccgcttggccatatgctccacgtattcagcagcgaacttctcgttatcgattatctccacatcccagttggcgctcggctgcccgggcgattcgttggtcagtaccacgatgccggcgtcacgggcttttttgaataccggctccagcacgttggcatcgttaggcacgatagtgatggcatccactttacgtgcaatcaggtcctcaataattttcacctgctgcggcgcatcggtgctggacggccctacctgggaggcgttgaggttaaactctttcccggcctggactaccccttcacccatccggttaaaccatggcatgccgtccacttttgaaatattgactacggttttttccgccgcatataccggcgcggaaataagcgcagcccccaacagcaaggatgaaaaaatattaacgaccagacgtttatgcataataattagcctcaatacgttgtagtcagacaggggtatgacgcaaagcggaaaaatagatagaaattgtaataatgttaataatttagaagagaataaacacaagctgtaacagcagacaggtaatattcagctataaatatggataataatactataatcctgtggcgtgagctttttcacaaaaaaaatgcaacatactttgttgttccagaataatgatcgggtcgcagagaaaatatatttttcccgcttcgttatttaccgaaaaacaatcacataaataacatcaggaaaagtatgtgatttttgattgcgcctccagccccttccgtggcaggatactccctatgaacagaaacgttatcgttacctatccccgccgttggtggctgcctgcataacaggcggcacgatacacgtttccattttcaaagccgccggaaggcggctttggtgttttcaggacgtctttcggctgaacagtctgataaggagtccctgatgaaccatccacaaaccatcctcaccggcgaccgcccgaccggccaacttcatcttggccactacgtcggctcgctgcgccagcgcgtcgcgctgcagcataaccaccagcaatttatcctgatcgccgacctgcaagggctcacggacaacggcagcaatccgcaaaaaatcagccaccatatcctcgaagtcatggccgattatctggccgtcggcatcgacaccaggctcaccactatttgcctgcagtccgccctgccggcgctggcggagctcagcgcgctgtatatgaatatcgtcaccgtcgcccgcgtagaacgtaatccgacggtcaaaaatgagattgcccagaagggattcgcccgctcgctgccggtgggttttctcgcctatccgattagccaggcggccgatatcaccgccttcaaagccgagctggtgccggtgggcgacgatcagctaccgatgattgagcagaccaacgagatcgtccacaagatgaatagcctcaccggcgagccggtgctgcgccactgtaaggcgctactcagcgaagtgagccgcctgccgggcgtcgatggcaacgccaaaatgtcgaaatcgctgggcaatacgctgacgttatcggccacagaggaggagatccaccacgcggtcagcgcgatgtataccgacccgacgcacctgagagtcagcgatccggggcatgtcaagggcaacgtggtgtttacctatctcgatgcattccacagcgataaggcgcgggtggcagagatgaaagcccactatcagcgcggcgggctgggcgatcgccagtgtaagaatgagctggagacctgcttgcagacgctactggcgccgatccgcgaacgcagggtcacttttattcaggataaagggatgctgctggagctgctgcgccagggcagcgaacgcgcccaccacctcacacagcagacgctgcatgaggtgaagcgtgggctgggtctgccggtgctgttctgagatggtgaaatactccctgtgcggataattttgttaacacgccgacaagaccctgtctttcgtatggacaatatcgccccggctgttactatcgcgttaacggtagctctcactatgcgtgtttcattaaggccaggatcgctgatgatgaccacataagtagcccagcgagcggctgcgcatcggcgcggcagagcgcggcgtcagcggccctccctccactttttcgtccttcgcaagaaggacgctccgcccgccggaggaaacacgcgcaccactcagcacagggaatcaagcgagtcgcgtatggacaaaataaagaaacgttgggcagggtattttgtcggcttactggtggtgctcgccgccgccgcatggtggctgctgcgcccgccgggactcccggcggggtttgccagcagcaacggccgaatcgaagccaccgaagttgatattgccagtaaaatcgccgggcgtatcgacaccattctggtcaaagagggtcagttcgtgcaccagggagaggtgctggcgagaatggatacccgggtactgaacgagcagcgtcttgaagccgccgcgcaaatcaaggaggcggaaagcgcggtcctggccgccagagccttgctcgatcagcgacaaagtgaaatgcgcgccagcgaagcggtagtgaagcagcgtcaggcggagctggattccacggcgaaacgccatgttcgctccaacaccctctcccagcgtggcgccgtctccgcccagcagctggatgacgatcgcgcggccgcagagagcgcccgcgcggcgctggaatcggcgaaagcccaggtctccgccgcccgcgccgccatcgaagctgcccgcaccagcattattcaggcgcaaacccgcgtcgaagccgcccaggcgaccgagcggcggatcctcgccgatattgacgatagcgagctgaaagccccccgcgatggccgcattcagtatcgcgtcgctgagccaggcgaagtcctggccgccggtggccgggtactgaacatggtcgatctcgccgatgtctatatgaccttttttctgcccaccgaacaggcaggtctgctggcgctcggcagcgaagcgcgcttggtccttgatgccgcgccggatctggtgatcccggccaatatcagctttgtcgccagcgtcgcccagttcacgccgaaaacggtcgagaccagcgacgagcgccttaagctaatgttccgcgtcaaagcgcgtatcccgccggagctgctggcgcagcacctggagtatgtcaaaaccggcctgcccggtatggcttacgtacggctggataaacaacaaccctggcctgaagccctggcggtgaggttgccgcaatgaaactaacgccgcaggatacctcgccccccgtcgccctgctggaacacgttggtcagcagtttggcgccaccatcgcgctgcgcgatatcagtctggcgatcccggcacggcgtatggttggcctgattggcccggacggcgtcggcaaatcgagcctgctttcgctgatcgccggggcgcggaccatcgagcaggggaacgtgatggtgcttggcggcgatatgcgcgatgtgcatcaccgccgcgaggtgtgtccgaaaatcgcgtggatgccgcaggggctggggaaaaacctctatcacactctctcggtgtatgaaaacgtcgacttcttcgcccgcctgttcggccacgataaagccgaacgcgaactgcgcatcaacgagctgctgcagagtaccgggctggcgccgtttcgcgatcgccccgccggaaaactctccggtgggatgaagcaaaagctcggcctgtgctgcgcgctgatccacgatccgcagctgctgatccttgatgaaccgaccaccggcgtcgatcccctctcccgggcgcagttctgggagcttatcgacagtattcgccagcgccagccggcgatgagcgtgctggtggccaccgcctacatggaagaggccgagcgctttgactggctggtggcgatgaacgccggcgaggtgctggcgaccggcagcgccgcagagctcaaagcccagaccggcagccagaccctggagcaggcgtttatcgccctgctgccagaagcacagcgtcaggcgcatagggcggtagttatcccaccgcgcgacagccgtgaggaagagatcgctatcgaagcgcgcggcctgaccatgcgcttcggcaactttgtggccgtcgaccacgttaactttcgcatcgcccgcggcgaaatctttggcttccttggatctaacggctgcggcaaatccaccaccatgaagatgctcaccggcctgctgcccgccagcgaaggtgaagcctggctgttcggccagccggtcgacccgaaggatatcgccacccgccagcgggtgggctatatgtcgcaggccttttcgctctatagcgaactgagcgtccggcaaaatctcgagctgcacgcccgcctgtttcatatcccggatgacgaaatagcccaccgggtcgctgagatgagcgagcgctttatgctgaccgaggttgaagacgcgcttcccgccgatctgccgctggggatccgtcagcgcctgtcgttagcggtggcggtcatccaccgcccggagatgctgatcctcgacgagccgacctccggcgtcgacccggtagcgcgggatatgttctggcagctgatggtagacctcgcgcggcaggatcaggtgaccatttttatctccacccactttatgaatgaggcggaacgctgcgatcgtatctccctgatgcacgccggcaaagtgctggccagcgatacgccgcaggcgctggtcgagcagcgcggttcaaacagcctggaagaggcgtttatcgcctggcttaaagaggcccagccgtcctctccagtaccagaagaacccacgtctgctgtggcatcgtattccggacacacggctccacggcaggccttcagtcttcgccggctgtttagctatagccgccgcgaggcgctggagctgcgccgcgatccggtacgatcgacgctggcgctgctggggacggtgatcctgatgtttatcatggggtatgggatcagcatggacgttgaggatctgcgctttgccgtcctcgaccgcgatcaaaccctcagcagccagggctggtcgcagaacatagccggttcacgctactttatcgagcaggcgccgctgcacagctatgacgaactggaccgccggatgcgcgatggcgagctggcggtggcaatagagatcccgccgaactttggtcgcgatatcgcccgcggcacgccggtgcaaatcggcgcgtgggtggacggcgcgatgcccaaccgcgcggaaaccgtgcgcggctacgtacaggcgatgcatctggcctggctgcaggagatggccggccggcagagcagcccgcagcgcgatacctcgctcatctccatcgagacccgctatcgctacaatccagacgtgaagagcctgccggccatcgtcccggcggtgatcccgctgctgctgatgatgatcccggcgatgctcagcgccctgagcgtagtacgtgaaaaagagctcgggtcgattatcaacttgtacgtgacgccgaccacccgtagcgagttcctgctcggcaagcagctgccttacatcgtactggggatgtttaacttcttcctgctgtgcgcgctgtcggtctttgtctttggcgtcgcgcataaggggagtttcctgacgctgaccctggcggcgctgctgtatgtcaccatcgccactggtctggggctgctgatctcaacctttatgaagagccaaatcgccgctattttcggtaccgcgattattacgctgatcccggcaacccagttttccggaatgatcgatccggtggcctcgctggaaggtcccgggcgctggattgggcaaatctacccgaccagccacttcctgactatcgcccgcgggaccttttcgaaagcgctgaatattagcgatttgtggggctcattcattccgctactgattgcggtgccgctggtgctcgggttgagcgtgctgctgctgcagaaacaggagggatgatgcgcggattacgcaatatttataatcttggcgtcaaagagctgcgcagcctgctcggtgataaagcgatgctggcgctgatcgtgtttgcgtttaccgtgtcggtgtactcctcggccacggtgatgcccggttcgctgcacctggcgccgatcgcggttgctgatatggataaatcccagctctcttcacgcatcattaacgctttctaccgtccctggtttcttgagccggagctgatcaccgctgatgagatggatgccgggctggatgccgggcgctacacgttcgccatcaacatcccgcctaacttccagcgcgatgtactggccggtcggcagccggaaatccaggtcaacgtcgacgccacgcgcatgagtcaggcctttaccggcaacggttacatccagaatattatcaccggcgaagtaaacagttttatcgcccgctatcgggataacagcgtgctgccggtagagctggcggtcaggatgcgttttaatcctaaccttgagcaggagcgctttggcgcggtgatggcgatcatcaacaatatcaccatgctggccattgtcctcaccggttcggcgctgatccgcgagcgggaacatggcaccattgagcatctgctggtgatgccggtcacgccgtttgaaatcatgatggccaagatctggtcgatgggcctggtggtgctggtggtctccgggctgtcgctggtgctgatggtacaggggattttgcaggtgcccattgaagggtcgattcccctgtttatgctgggggtggcgctcagcctgttcgccactacctcgatcggcatttttatgggcaccctcgcccgctcgatgccgcagctggggctgctgatgatcctggtcttactgccgctgcagatgctctccggcggatccacgccgcgagaaagtatgccgcagctggtacaggatattatgttgaccatgccgaccacctacttcgtcagcctggcgcaggcgatattgtatcgaggcgccagcttcgccatcgtctggccgcagttcttaaccttgctggctatcggcggagtgttctttagtatcgcgttgctgcgttttcgtaagactatcggtgagatggcataaaggcttaagaagggccgtcgacttacggcggccgaatggtttatttatggcgattcataaagcgacgtaaaccccaggtgaaggccatcgccatactgaagagaatgaacagcaacaccacccagctgatggagatgcgcagcagcgtgccgggggtcataaacggctgcagatacacggtgaaggactgggcgggtgattttcccagcagttcataaacgttatcggtgagccacacgccgacccgacagaacaaccagataatcgctggccagcagagcagcaccagaaaggtaaagcgctcctgaatgtaagtgaagagctggcgcaatggcgaccagttaagcaggattttcatttctattctcatttgccagccgagaacctgcatatgtctcgcaaggcatttcgggcagcatccatacaggcaatcatccctctttgtatatcaaatttgctgccatataaaccagatcaagttaacaaagtgttaatgataaagctcatttagacaaaaacagggaagaagcataccgttcgccacaatacatccggaagcgaagtatccagtcacggaaatattttttctgaagcgtaaacgcgttattttgtgggaggaagaggccgcatcattattttaccggggcacaatataatggcgctgaaataaagagataatattaatcgtagctgctgataattattttccgacttgtatcatccggtaaattcactatccggttgaccatgccacaagcattcgtcacgctattttgcgaagcaataaaggcggtgctgcgcactttgtccggggtacggttttgtagccccggtaagcgcagcgccaccgggggagatataccccacacagcaaaaaaccccgcacctttcggggcggggttctttttaaacgcaaaaacaaaaagcccggtctttcgaccgggctttctgctttatttgatgcctggcagttccctactctcacatggggagaccccacactaccatcggcgctacggcgtttcacttctgagttcggcatggggtcaggtgggaccaccgcgctagtgccgccaggcaaattctttgtgctcagtacgcaattctttatattgcgtactcaactctgaatctaagctgaaaattctctcaatccgccaaaacatcttcggcgttgtaaggttaagcctcacggttcattagtaccggttagctcaacgcatcgctgcgcttacacacccggcctatcaacgtcgtcgtcttcaacgttccttcaggagacttaaagtctcagggagaactcatctcggggcaagtttcgtgcttagatgctttcagcacttatctcttccgcatttagctaccgggcagtgccattggcatgacaaccc
